(19) United States
(12) Patent Application Publication
(10) Pub. No.: US 2020/0255482 A1
(43) Pub. Date: Aug. 13, 2020

(54) INSECTICIDAL COMBINATIONS

(71) Applicant: Vestaron Corporation, Kalamazoo, MI (US)

(72) Inventors: Robert M. KENNEDY, Dexter, MI (US); Lin BAO, Portage, MI (US)

(73) Assignee: Vestaron Corporation, Kalamazoo, MI (US)

(21) Appl. No.: 16/865,287

(22) Filed: May 1, 2020

Related U.S. Application Data
(63) Continuation-in-part of application No. 16/865,193, filed on May 1, 2020.
Application No. 16/865,193 is a division of application No. 15/390,153, filed on Dec. 23, 2016, now Pat. No. 10,669,319.
Application No. 15/390,153 is a division of application No. 14/383,841, filed on Sep. 8, 2014, now Pat. No. 9,567,381.
(60) Provisional application No. 61/729,905, filed on Nov. 26, 2012.
(60) Provisional application No. 61/698,261, filed on Sep. 7, 2012.
(60) Provisional application No. 61/644,212, filed on May 8, 2012.
(60) Provisional application No. 61/608,921, filed on Mar. 9, 2012.

(51) Int. Cl. C07K 14/435; A01N 63/10; C12N 15/82

(52) U.S. Cl. CPC C07K 14/43518; A01N 63/10; C07K 2319/55; C07K 14/43504; Y02A 40/162; C12N 15/8286

(57) ABSTRACT

New insecticidal nucleotides, peptides, polypeptides, and proteins, and their expression in plants; methods of producing new peptides; new processes and production techniques; new formulations; new organisms; and a process which increases the insecticidal peptide production yield from yeast expression systems. The present invention is also directed to insecticidal peptides we call cysteine rich insecticidal peptides (CRIPS), and mixtures and/or compositions thereof with pore-forming insecticidal proteins (PFIPs). The present invention also describes mixtures and compositions of CRIPs with Bacillus thuringiensis (Bt), and the genes and/or proteins therefrom, in various formulations and combinations, of both genes and peptides, useful for the control of insects.

### CROSS REFERENCE TO RELATED APPLICATIONS

[0001] This application is a continuation-in-part application of U.S. patent application Ser. No. 16/865,193, filed on May 1, 2020, which is a divisional application of U.S. patent application Ser. No. 15/390,153, filed on Dec. 23, 2016, which is a divisional application of U.S. patent application Ser. No. 14/383,841, filed on Sep. 8, 2014, which is a 371 of PCT Application No. PCT/US2013/030042, filed on Mar. 8, 2013, which claims the benefit of earlier filed U.S. Provisional Application Ser. No. 61/608,921, filed on Mar. 9, 2012, U.S. Provisional Application Ser. No. 61/644,212, filed on May 8, 2012, U.S. Provisional Application Ser. No. 61/698,261, filed on Sep. 7, 2012, and U.S. Provisional Application Ser. No. 61/729,905, filed Nov. 26, 2012, the entire contents of which are incorporated herein by reference.

### SEQUENCE LISTING

[0002] This application incorporates by reference in its entirety the Sequence Listing entitled “225312-461782_FAMXUSCIP2_ST25.txt” (5.49 MB), which was created on May 1, 2020, and filed electronically herewith.

### TECHNICAL FIELD

[0003] New insecticidal proteins, nucleotides, peptides, their expression in plants, methods of producing the peptides, new processes, production techniques, new peptides, new formulations, and combinations of new and known organisms that produce greater yields than would be expected of related peptides for the control of insects are described and claimed.

### BACKGROUND

[0004] The global security of food produced by modern agriculture and horticulture is challenged by insect pests. Farmers rely on insecticides to suppress insect damage, yet commercial options for safe and functional insecticides available to farmers are diminishing through the removal of dangerous chemicals from the marketplace and the evolution of insects that are resistant to all major classes of chemical and biological insecticides. New insecticides are necessary for farmers to maintain crop protection.

[0005] Insecticidal peptides are peptides that are toxic to their targets, usually insects or arachnids of some type, and often the peptides can have arthropod origins such as from scorpions or spiders. They may be delivered internally, for example by delivering the toxin directly to the insect's gut or internal organs by injection or by inducing the insect to consume the toxin from its food, for example an insect feeding upon a transgenic plant, and/or they may have the ability to inhibit the growth, impair the movement, or even kill an insect when the toxin is delivered to the insect by spreading the toxin to locus inhabited by the insect or to the insect's environment by spraying, or other means, and then the insect comes into some form of contact with the peptide.

[0006] Insecticidal peptides however have enormous problems reaching the commercial market and to date there have been few if any insecticidal peptides approved and marketed for the commercial market, with one notable exception, peptides derived from Bacillis thuringiensis or Bt. However, even now there is concern over rising insect resistance to Bt proteins. Bt proteins, or Bt peptides, are effective insecticides used for crop protection in the form of both plant incorporated protectants (PIPs) and foliar sprays. Commercial formulations of Bt proteins are widely used to control insects at the larval stage.

[0007] Cysteine-Rich Bioactive Peptides (CRBPs) are peptides, polypeptides, and/or proteins that possess cysteine residues capable of forming disulfide bonds; these disulfide bonds create a scaffolding motif that is observed in a wide variety of unrelated protein families. An example of peptides that fall within the CRBP family are inhibitor cystine knot (ICK) peptides.

[0008] ICK peptides include many molecules that have insecticidal activity. Such ICK peptides are often toxic to naturally occurring biological target species, usually insects or arachnids of some type. Often ICK peptides can have arthropod origins such as the venoms of scorpions or spiders.

[0009] Bt is the one and only source organism of commercially useful insecticidal peptides. Other classes and types of potential peptides have been identified, such as Trypsin modulating oostatic factor (TMOF) peptides. TMOF peptides have to be delivered to their physiological site of action in various ways, and TMOF peptides have been identified as a potential larvicides, with great potential, see D. Borovsky, Journal of Experimental Biology 206, 3869-3875, but like nearly all other insecticidal peptides, TMOF has not been commercialized or widely used by farmers and there are reasons for this.

[0010] The ability to successfully produce insecticidal peptides on a commercial scale, with reproducible peptide formation and folding, at a reasonable and economical price, can be challenging. The wide variety, unique properties and special nature of insecticidal peptides, combined with the huge variety of possible production techniques, can present an overwhelming number of approaches to peptide application and production, but few, if any, are commercially successful.

[0011] There are several reasons why so few of the multitude insecticidal peptides that have been identified have ever made it to market. First, most insecticidal peptides are either to delicate or not toxic enough to be used commercially. Second, insecticidal peptides are difficult and costly to produce commercially. Third, many insecticidal peptides quickly degrade and have a short half-life. Fourth, very few insecticidal peptides fold properly when then are expressed by a plant, thus they lose their toxicity in genetically modified organisms (GMOs). Fifth, most of the identified insecticidal peptides are blocked from systemic distribution in the insect and/or lose their toxic nature when consumed by insects. Bt proteins are an exception to this last problem and because they disrupt insect feeding they have been widely used.

[0012] Here we present several solutions to these major problems which have prevented the commercialization and wide spread use of insecticidal peptides. In Part I, we describe how to create special expression cassettes and systems that allow plants to generate and express properly folded insecticidal peptides that retain their toxicity to insects.

[0013] In Part II, we describe how to make a relatively small change to the composition of a peptide and in so doing dramatically increase the rate and amount that can be made through fermentation. This process also simultaneously lowers the cost of commercial industrial peptide production. This section teaches how a protein can be “converted” into a different, more cost effective peptide, that can be produced at higher yields and yet which surprisingly is just as toxic as before it was converted.

[0014] In Part III, we describe how to combine different classes of insecticidal peptides such that they can operate together in a synergistic manner to dramatically change and increase the toxicity and activity of the component peptides when compared to their individual components. This section also provides details and data to support our system, methods and peptide combinations and formulations to deal with a looming threat of the development and distribution of Bt resistant insects. Bt resistant insects represent the next great threat to the global supply of food and we teach those skilled in the art how to meet and defeat this threat.

[0015] In Part IV, we describe, inter alia, additional mixtures and compositions comprising two types of insecticidal peptides, wherein the first type of insecticidal peptide is a Pore Forming Insecticidal Protein (PFIP), and the second type of insecticidal peptide is a Cysteine Rich Insecticidal Peptide (CRIP), wherein the PFIP is a Bacillus thuringiensis toxin (Bt), and wherein the CRIP is an atracotoxin (ACTX), a ctenitoxin (CNTX), an Av2 toxin, an Av3 toxin, or an Av3-Variant Polypeptide (AVP); and wherein neither the PFIP or CRIP are part of a fusion protein; including the ratios and methods of using thereof.

### SUMMARY

[0016] This invention describes how to produce toxic insecticidal peptides in plants so they fold properly when expressed by the plants. It describes how to produce peptides in high yields in laboratory and commercial production environments using various vectors. It describes one class of toxic insecticidal peptide we call CRIPS which stands for Cysteine Rich Insecticidal Peptides (CRIPS). It describes another class of toxic insecticidal peptides we call PFIPS which stands for Pore Forming Insecticidal Proteins (PFIPS). And it describes how novel and insecticidal activity combinations of CRIPS and PFIPS can be fashioned together and used for a variety of purposes, including the protection of crops against of Bt or Bacillus thuringiensis peptide resistant insects. We disclose how to make and use combinations of CRIPS and PFIPS to kill and control insects, even Bt resistant insects, at every low doses. Without being bound by theory, our understanding of Bt or Bacillus thuringiensis peptides and proteins, allows us to teach one ordinarily skilled in the art, to create novel methods, compositions, compounds (proteins and peptides) and procedures to protect plants and control insects.

[0017] We describe and claim a protein comprised of an Endoplasmic Reticulum Signal Peptide (ERSP) operably linked to a Cysteine Rich Insecticidal Protein (CRIP) such as an Inhibitor Cysteine Knot (ICK) motif protein wherein said ERSP is the N-terminal of said protein (ERSP-ICK). A peptide wherein said ERSP is any signal peptide which directs the expressed CRIP to the endoplasmic reticulum of plant cells. A peptide wherein said CRIP is an Inhibitor Cystine Knot (ICK) protein. A peptide wherein said CRIP is a Non-ICK protein. A peptide wherein said ERSP is a peptide between 5 to 50 amino acids in length, originating from a plant. A peptide operably linked to a Translational Stabilizing Protein (STA), wherein said ERSP is the N-terminal of said protein and a Translational Stabilizing Protein (STA) may be either on the N-terminal side of the CRIP, which is optionally an ICK motif protein (ERSP-STA-ICK); or Non-ICK motif protein (ERSP-STA-Non-ICK) or on the C-terminal side of the ICK or Non-ICK motif protein (ERSP-ICK-STA) or (ERSP-Non-ICK-STA).

[0018] We describe and claim a peptide with an N-terminal dipeptide which is added to and operably linked to a known peptide, wherein said N-terminal dipeptide is comprised of one nonpolar amino acid on the N-terminal of the dipeptide and one polar amino acid on the C-terminal of the dipeptide, wherein said peptide is selected from a CRIP (Cysteine Rich Insecticidal Peptide), such as from an ICK peptide, or a Non-ICK peptide. A peptide with an N-terminal dipeptide which is added to and operably linked to a known peptide, where the N-terminal dipeptide is comprised of one nonpolar amino acid on the N-terminal of the dipeptide and one polar amino acid on the C-terminal of the dipeptide. A peptide where the non-polar amino acid from the N-terminal amino acid of the N-terminal dipeptide is selected from glycine, alanine, proline, valine, leucine, isoleucine, phenylalanine and methionine. A peptide where the polar amino acid of the C-terminal amino acid of the N-terminal peptide is selected from serine, threonine, cysteine, asparagine, glutamine, histidine, tryptophan, tyrosine. A peptide of claim 8 where the non-polar amino acid from the N-terminal amino acid of the N-terminal dipeptide is selected from glycine, alanine, proline, valine, leucine, isoleucine, phenylalanine and methionine and said polar amino acid of the C-terminal amino acid of the N-terminal peptide is selected from serine, threonine, cysteine, asparagine, glutamine, histidine, tryptophan, tyrosine. A peptide where the dipeptide is comprised of glycine-serine.

[0019] We describe a composition comprising at least two types of insecticidal protein or peptides wherein one type is a Pore Forming Insecticidal Protein (PFIP) and the other type is a Cysteine Rich Insecticidal Peptide (CRIP). A composition where the CRIP is an ICK and optionally, said ICK is derived from, or originates from Hadronyche versuta, or the Blue Mountain funnel web spider, Atrax robustus, Atrax formidabilis, Atrax infensus, including toxins known as U-ACTX polypeptides, U-ACTX-Hv1a, rU-ACTX-Hv1a, rU-ACTX-Hv1b, or mutants or variants. A composition where the CRIP is a Non-ICK CRIP and optionally said Non-ICK CRIP is derived from, or originates from, animals having Non-ICK CRIPS such as sea anemones, sea urchins and sea slugs, optionally including the sea anemone named Anemonia viridi, optionally including the peptides named Av2 and Av3 especially peptides similar to Av2 and Av3 including such peptides listed in the sequence listing or mutants or variants.

[0020] We describe a method of using the composition of claim 13 to control Bt resistant insects comprising, creating composition of at least two types of peptides wherein one type of peptide is a pore forming insecticidal protein (PFIP) and the other type of peptide is a cysteine rich insecticidal peptide (CRIP) and the PFIP and CRIP proteins are selected from any of the compositions described in claim 1 and herein and from any of the proteins provided in the sequence listing and then applying said composition to the locus of the insect. A method of controlling Bt resistant insects comprising protecting a plant from Bt resistant insects comprising, creating a plant which expresses a combination of at least two properly folded peptides wherein one type of peptide is a pore forming insecticidal protein (PFIP) and the other type of peptide is a cysteine rich insecticidal peptide (CRIP) and the PFIP and CRIP proteins are selected from any of the compositions described herein and from any of the proteins provided in the sequence listing. A method where the CRIP is administered any time during which the PFIP is affecting the lining of the insect gut. A method where the CRIP is administered following the testing of the insect for Bt resistance and wherein said insect tested positive for Bt resistance. We describe the application of any of the compounds described herein in solid or liquid form to either the insect, the locus of the insect or as a Plant Incorporated Protectant.

[0021] In a first aspect, the present disclosure provides an insecticidally effective combination comprising a mixture of two types of insecticidal peptides, wherein the first type of insecticidal peptide is a Pore Forming Insecticidal Protein (PFIP), and the second type of insecticidal peptide is a Cysteine Rich Insecticidal Peptide (CRIP), wherein the PFIP and CRIP are not fused together.

[0022] In further aspects, the present disclosure provides a composition comprising the two types of insecticidal peptides, wherein the first type of insecticidal peptide is a Pore Forming Insecticidal Protein (PFIP), and the second type of insecticidal peptide is a Cysteine Rich Insecticidal Peptide (CRIP), wherein the PFIP and CRIP are not fused together, and an excipient

[0023] In addition, the present disclosure describes a method to control insects comprising, providing a mixture of at least two types of peptides, wherein the first type of peptide is a PFIP, and the second type of peptide is a CRIP; wherein the PFIP is not fused to the CRIP; and then applying said mixture to the locus of an insect.

[0024] In addition, the present disclosure describes a method to control Bacillus thuringiensis-toxin-resistant insects comprising, providing a mixture of at least two types of peptides, wherein the first type of peptide is a PFIP, and the second type of peptide is a CRIP; wherein the PFIP is not fused to the CRIP; and then applying said mixture to the locus of an insect.

[0025] In addition, the present disclosure describes a method of protecting a plant from an insect comprising, providing a plant which expresses two or more polypeptides, wherein one type of polypeptide is a PFIP, or a polynucleotide encoding the same; and the other type of polypeptide is a CRIP, or polynucleotide encoding the same; and wherein the PFIP is not fused to the CRIP.

[0026] In addition, the present disclosure describes a method of protecting a plant from a Bacillus thuringiensis-toxin-resistant insect comprising, providing a plant which expresses two or more polypeptides, wherein one type of polypeptide is a PFIP, or a polynucleotide encoding the same; and the other type of polypeptide is a CRIP, or polynucleotide encoding the same; and wherein the PFIP is not fused to the CRIP.

[0027] In addition, the present disclosure describes a method for controlling insects comprising, providing to said insect a transgenic plant that comprises in its genome a stably incorporated nucleic acid construct, wherein said stably incorporated nucleic acid construct comprises a first polynucleotide operable to encode a PFIP, and a second polynucleotide operable to encode a CRIP.

[0028] In addition, the present disclosure describes a method of combating, controlling, or inhibiting a pest comprising, applying a pesticidally effective amount of the mixture of comprising two types of insecticidal peptides, wherein the first type of insecticidal peptide is a Pore Forming Insecticidal Protein (PFIP), and the second type of insecticidal peptide is a Cysteine Rich Insecticidal Peptide (CRIP), wherein the PFIP and CRIP are not fused together, to the locus of the pest, or to a plant or animal susceptible to an attack by the pest.

[0029] In addition, the present disclosure describes a composition comprising a mixture comprising one or more PFIPs and one or more CRIPS to control insects, and an excipient.

### BRIEF DESCRIPTION OF THE DRAWINGS

[0030] FIG. 1 is a diagram of invention of N-terminal fusion of ERSP (Endoplasmic Reticulum Signal Peptide in diagonal stripes) to a CRIP (Cysteine Rich Insecticidal Protein) such as ICK (Inhibitor Cysteine Knot) motif in vertical stripes).

[0031] FIG. 2 is a diagram of invention of N-terminal fusion of ERSP (diagonal stripes) to an CRIP motif insecticidal protein (vertical stripes) that is fused with a STA (Translational Stabilizing Protein in horizontal stripes). There are two possible orientations shown in FIG. 2.

[0032] FIG. 3 is a diagram of invention of N-terminal fusion of ERSP (diagonal stripes) fused to a CRIP motif (vertical stripes) that is fused with a translational stabilizing protein (STA) shown in horizontal stripes. The STA is separated from the CRIP motif by an intervening sequence called an intervening linker peptide (LINKER) shown in checkerboard. Two possible orientations are shown in FIG. 3.

[0033] FIG. 4 is a diagram similar to FIG. 3 with the (LINKER-CRIP) motif with the subscript letter “N” to show that the LINKER-CRIP motif can be used once or repeated several time, preferably from 1-10 repeats and even more up to 15, 20 or 25 times are possible.

[0034] FIG. 5 is a diagram that shows that the CRIP-LINKER or ICK-LINKER group can also function as a STA-LINKER group. In other words, the combination of CRIP-LINKER or ICK-LINKER can function as a STA-LINKER. In other words one can use two ICK motifs with one LINKER and dispense with the need for a Translational Stabilizing Protein or STA.

[0035] FIG. 6 is a diagram of a covalent cross-linking of the cysteines in an inhibitor cysteine knot (ICK) motif protein. The arrows in the diagram represent β sheets; the numbers represent the ICK motif-forming cystine amino acids, numbered in the order of their occurrence in the primary structure from N to C terminus. The thick curved line represents the primary structure of the protein; the thin straight lines represent the covalent cross-linking of the specific cysteines to create an ICK motif. Sometimes the β sheet encompassing cysteine number 2 is not present.

[0036] FIG. 7 is a graph of the ELISA detected levels of ACTX (as a percentage of Total Soluble Protein (% TSP) resulting from expression from plant transgenes encoding ACTX as a translational fusion with the various other structural elements.

[0037] FIG. 8 is a graph of iELISA detected % TSPs of tobacco transiently expressed GFP fused U-ACTX-Hv1a with different accumulation localization. APO: apoplast localization; CYTO: cytoplasm localization; ER: endoplasm reticulum localization.

[0038] FIG. 9 is a graph of iELISA detected % TSPs of tobacco leaves transiently expressing GFP fused U-ACTX-Hv1a using the FECT expression vectors encoding translational fusions with three different ERSP sequences: BAAS signal peptide (BGIH), Extensin signal peptide (EGIH) and modified Extensin signal peptide (E*GIH).

[0039] FIG. 10 is a diagram of the concentration process of trypsin treated and non-trypsin treated Jun a 3 fused Omega-ACTX-Hv1a protein extracted from the transiently transformed tobacco leaves.

[0040] FIG. 11 depicts HPLC chromatographs for the samples containing omega-ACTX-Hv1a samples loaded on the HPLC system to produce the chromatographs were as follows: A. 25 μg synthetic omega-ACTX-Hv1a; B. 500 μL of Sample B 1 kD filtration retentate; C. 500 μL of Sample A 1 kD filtration retentate.

[0041] FIG. 12 is a graphical representation of the distribution of the normalized peptide yields of both U+2-ACTX-Hv1a (sometimes referred to herein as “U+2”) and native U-ACTX-Hv1a (sometimes referred to herein as “native U”), produced in Kluyveromyces lactis (K. lactis) strains. The U+2 data is shown in black and the native U data is in gray. The x-axis shows the normalized yield in units of milligrams per liter per light absorbance unit at wavelength of 600 nm (mg/L·A.) The left y-scale shows the fraction of U+2 strains. The right y-scale shows the fraction of native U strains.

[0042] FIG. 13 is another graphical representation of the distribution of the normalized peptide yields from U+2 and native U-ACTX-Hv1a K. lactis strains. Here the y-axis shows the normalized yield (normalized for cell density in the respective cultures as described below) in milligrams per liter per light absorbance unit at wavelength of 600 nm (mg/L·A.) for individual strains, and the x-axis corresponds to the percentile rank of the observed yield for each strain, in relation to the yield observed for all other K. lactis strains engineered to produce the same peptide isoform.

[0043] FIG. 14 is a graphical representation of the dose-response of housefly injection bioassays with U+2 and native U-ACTX-Hv1a. The U+2 data is marked with black round dots and the native U data is marked with gray triangles. The x-scale shows the dose in units of picomoles per gram of housefly. The y-scale shows the mortality percentage.

[0044] FIG. 15 is a graphical representation of the distribution of the peptide yields from U+2 and native U-ACTX-Hv1a produced from Pichia pastoris (P. pastoris) strains. The U+2 data is shown in black and the native U data is in gray. The x-axis shows the yield in milligrams per liter and the y-scale shows the fraction of total U+2 or native U production from P. pastoris strains.

[0045] FIG. 16 is another graphical representation of the distribution of the peptide yields of U+2 and native U-ACTX-Hv1a produced from P. pastoris strains. Here the y-axis shows the yield in milligrams per liter for individual strains, and the x-axis corresponds to the percentile rank of the observed yield for each strain (in relation to the yields observed for all other P. pastoris strains engineered to produce the same peptide isoform).

[0046] FIG. 17 is a graphical representation of the distribution of the peptide yields of sea anemone toxin, Av3 and Av3+2, produced from the K. lactis expression strains. The native toxin is named Av3 from the sea anemone named Anemonia viridis. The modified toxin here is labeled Av3+2. Like the example above we produced the toxic peptides in strains of Kluyveromyces lactis or K. lactis. The x-axis shows the peptide yield in mAu·sec/A for individual strains, and the y-axis shows the fraction of the strains. In FIG. 17 the native Av3 strain is shown in light grey, the modified high production strain Av3+2 is shown in black.

[0047] FIG. 18 shows the difference in the peptide yields of Av3+2 and native Av3 produced from the corresponding K. lactis strains by plotting the peptide yields as a function of the percentile rank of the transformants which produce the same peptide. Here the y-axis shows the normalized yield in mAu·sec/A for individual strains, and the x-axis corresponds to the percentile rank of the observed yield for each strain, in relation to the yield observed for all other K. lactis strains engineered to produce the same peptide isoform.

[0048] FIG. 19 depicts a graph of a foliar bioassay 24 hour percent mortality vs. age of larvae after application and exposure to ICK peptides or Bt proteins.

[0049] FIG. 20 shows a graph of a foliar bioassay measuring percent mortality at 18, 24 and 48 hour post application using Bt proteins or ICK peptides or combination of Bt+ICK peptides on 72 hour larvae.

[0050] FIG. 21 shows a graph of a foliar feeding bioassay measuring foliar damage by insects resistant to Bt, at 24 hr and 48 hr after exposure to Bt proteins or Non-ICK CRIP or their combinations.

[0051] FIG. 22 depicts a graph of a foliar feeding bioassay measuring percent mortality at 24 and 48 hour post application using Bt proteins or ICK peptides or their combination on Bt protein resistant P. xylostella larvae.

[0052] FIG. 23 shows a graph depicting the 24-hour mortality of mosquito larvae after a after a diet incorporation assay using (1) U+2-ACTX-Hv1a with Bti; (2) Bti toxin alone; (3) U+2-ACTX-Hv1a alone; and (4) water (as an untreated control).

[0053] FIG. 24 depicts a graph showing the 3-day mortality of the Lepidopteran species, the beet armyworm (Spodoptera exigua) after a diet incorporation assay with Bacillus thuringiensis var. kurstaki toxins (Btk) combined with Γ-CNTX-Pn1a. Here, the treatments were (1) Γ-CNTX-Pn1a alone; (2) Btk toxin alone; (3) a combination of Γ-CNTX-Pn1a and Btk toxin; or (4) a control (0.125% Vintre, a surfactant).

[0054] FIG. 25 depicts a graph showing the 3-day mortality of the Lepidopteran species, the beet armyworm (Spodoptera exigua), after a diet incorporation assay with Btk combined with Av3b-Variant Polypeptides (AVPs). Here, (1) AVP alone; (2) Btk toxin alone; (3) a combination of both AVP and Btk toxin; or (4) a control (0.125% Vintre, a surfactant) were tested.

[0055] FIG. 26 depicts a graph showing the 4-day mortality of the Coleopteran species, the Darkling Beetle (Alphitobius diaperinus) after a diet incorporation assay with (1) U+2-ACTX-Hv1a alone; (2) Btt toxin alone; (3) a combination of both U+2-ACTX-Hv1a and Btt toxin; or (4) an untreated control (water).

[0056] FIG. 27 depicts a graph showing the 4-day mortality of the Colorado potato beetle (Leptinotarsa decemlineata) when sprayed with (1) U+2-ACTX-Hv1a alone; (2) Btt toxin alone; (3) a combination of both U+2-ACTX-Hv1a and Btt toxin; or (4) an untreated control (water).

### BRIEF DESCRIPTION OF THE SEQUENCE LISTING

[0057] This invention includes a sequence listing of 1637 sequences.

[0058] SEQ ID NOs: 1-28, 1553-1570, and 1593 are mentioned or referred to in Part 1.

[0059] SEQ ID NOs: 29-32, and 1571-1592 are mentioned or referred to in Part 2.

[0060] SEQ ID NOs: 33-1042 are mentioned or referred to in Part 3.

[0061] SEQ ID NOs: 1043-1221 are sequences derived from or having a spider origin.

[0062] SEQ ID NOs: 1222-1262 are sequences derived from or having a sea anemone origin.

[0063] SEQ ID NOs: 1263-1336 are sequences derived from or having a scorpion origin.

[0064] SEQ ID NOs: 1337-1365 are sequences derived from or having a scorpion origin.

[0065] SEQ ID NOs: 1366-1446 are sequences derived from or having a Cry or Cyt origin.

[0066] SEQ ID NOs: 1447-1552 are sequences derived from or having a VIP origin.

[0067] SEQ ID NOs: 1553-1775 are sequences derived from or having an arachnid origin

[0068] SEQ ID NOs: 1776 and 1777 are wild-type Kappa-AcTx-Hv1c and wild-type Omega-HXTX-Ar1d amino acid sequences, respectively.

[0069] SEQ ID NO: 1778 is γ-CNTX-Pn1a.

[0070] SEQ ID NO: 1779-1782 are amino acid sequences of sea anemone toxins and variants thereof.

### DETAILED DESCRIPTION

### Definitions

[0071] The term “5′-end” and “3′-end” refers to the directionality, i.e., the end-to-end orientation of a nucleotide polymer (e.g., DNA). The 5′-end of a polynucleotide is the end of the polynucleotide that has the fifth carbon.

[0072] “ACTX” or “ACTX peptide” means a Family of insecticidal ICK peptides that have been isolated from an Australian funnel-web spiders belonging to the Atracinae subfamily. One such spider is known as the Australian Blue Mountains Funnel-web Spider, which has the scientific name Haydronyche versuta. Two examples of ACTX peptides from this species are the Omega and U peptides.

[0073] “Alpha-MF signal” or “αMF secretion signal” refers to a protein that directs nascent recombinant polypeptides to the secretory pathway.

[0074] “Agent” refers to one or more chemical substances, molecules, nucleotides, polynucleotides, peptides, polypeptides, proteins, poisons, insecticides, pesticides, organic compounds, inorganic compounds, prokaryote organisms, or eukaryote organisms, and agents produced therefrom.

[0075] “Agriculturally-acceptable carrier” covers all adjuvants, inert components, dispersants, surfactants, tackifiers, binders, etc. that are ordinarily used in pesticide formulation technology; these are well known to those skilled in pesticide formulation.

[0076] “Agroinfection” means a plant transformation method where DNA is introduced into a plant cell by using Agrobacteria A. tumefaciens or A. rhizogenes.

[0077] “BAAS” means barley alpha-amylase signal peptide. It is an example of an ERSP.

[0078] “Biomass” refers to any measured plant product.

[0079] “Binary vector” or “binary expression vector” means an expression vector which can replicate itself in both E. coli strains and Agrobacterium strains. Also, the vector contains a region of DNA (often referred to as t-DNA) bracketed by left and right border sequences that is recognized by virulence genes to be copied and delivered into a plant cell by Agrobacterium.

[0080] “Bt,” also known as Bacillus thuringiensis or B. thuringiensis, means a gram-positive soil bacterium that has been used worldwide for more than sixty years to control agricultural, forestry, and public health insect pests.

[0081] “Bt proteins” and “Bt peptides” or “Bt toxic peptides” are used interchangeably and refer to peptides produced by Bt. Such peptides are frequently written as “cry”, “cyt” or “VIP” proteins encoded by the cry, cyt and vip genes. Bt proteins are more usually attributed to insecticidal crystal proteins encoded by the cry genes, and are also examples of PFIPS (Pore Forming Insecticidal Proteins) see definition below. Examples PFIPS and other Bt proteins are provided in the sequence listing. For example, in some embodiments, a Bt toxic peptide can be Cry1, Cry1A, Cry1B, Cry1C, Cry1Ca, Cry1Cb, Cry1E, Cry1F, Cry1G, Cry2, Cry3, Cry3A, Cry3B, Cry3C, Cry4, Cry5, Cry6, Cry7, Cry8, Cry8Aa, Cry9, Cry10, Cry11, Cry12, Cry13, Cry14, Cry16, Cry17, Cry18, Cry21, Cry22, Cry23, Cry23A, Cry26, Cry28, Cry29Aa, Cry31, Cry34, Cry35, Cry37, Cry37A, Cry43, Cry48, Cry49, CryET70, CryET76, CryET80, Cyt1, and Cyt2.

[0082] “C-terminal” refers to the free carboxyl group (i.e., —COOH) that is positioned on the terminal end of a polypeptide.

[0083] “Chimeric gene” means a DNA sequence that encodes a gene derived from portions of one or more coding sequences to produce a new gene.

[0084] “Cleavable linker” means a short peptide sequence in the protein that is the target site of proteases that can cleave and separate the protein into two parts or a short DNA sequence that is placed in the reading frame in the ORF and encoding a short peptide sequence in the protein that is the target site of protease that can cleave and separate the protein into two parts.

[0085] “Cloning” refers to the process and/or methods concerning the insertion of a DNA segment (e.g., usually a gene of interest, for example a gene encoding a heterologous polypeptide of interest) from one source and recombining it with a DNA segment from another source (e.g., usually a vector, for example, a plasmid) and directing the recombined DNA, or “recombinant DNA” to replicate, usually by transforming the recombined DNA into a bacteria or yeast host.

[0086] “Conditioned medium” means the cell culture medium which has been used by cells and is enriched with cell derived materials but does not contain cells.

[0087] “Conversion” or “converted” refers to the process of making a high-production peptide.

[0088] “CRIP” and “CRIPS” is an abbreviation for Cysteine Rich Insecticidal Protein or Proteins. Cysteine rich insecticidal peptides (CRIPS) are peptides rich in cysteine which form disulfide bonds. CRIPS contain at least four (4), sometimes six (6), and sometimes eight (8) cysteine amino acids among proteins or peptides having at least 10 amino acids where the cysteines form two (2), three (3) or four (4) disulfide bonds. The disulfide bonds contribute to the folding, three-dimensional structure, and activity of the insecticidal peptide. The cysteine-cysteine disulfide bonds and the three dimensional structure they form play a significant role in the toxicity of these insecticidal peptides. A CRIP is exemplified by both inhibitor cystine knot or ICK peptides (usually having 6-8 cysteines) and by examples of toxic peptides having disulfide bonds but that are not considered ICK peptides (Non-ICK CRIPS). Examples of an ICK would be an ACTX peptide from a spider and defined above. Examples of a Non-ICK CRIP would be a peptide like Av2 and Av3 which are peptides first identified from sea anemones. These peptides are examples of a class of compounds that modulate sodium channels in the insect peripheral nervous system (PNS). Non-ICK CRIPS can have 4-8 cysteines which form 2-4 disulfide bonds. These cysteine-cysteine disulfide bonds stabilized toxic peptides (CRIPS) can have remarkable stability when exposed to the environment. Many CRIPS are isolated from venomous animals such as spiders, scorpions, snakes and sea snails and sea anemones and they are toxic to insects. Additional description is provided below.

[0089] “Cysteine-Rich Bioactive Peptides (CRBPs)” refers to peptides, polypeptides, and/or proteins that possess cysteine residues capable of forming disulfide bonds; these disulfide bonds create a scaffolding motif that is observed in a wide variety of unrelated protein families. In some embodiments, a CRBP comprises 2 to 8 cystines. In some embodiments, a CRBP comprises 2 to 6 cystines. In some embodiments, a CRBP has a molecular weight of 10 kDa or lower.

[0090] “Cystine” refers to an oxidized cysteine-dimer. Cystines are sulfur-containing amino acids obtained via the oxidation of two cysteine molecules, and are linked with a disulfide bond.

[0091] “Defined medium” means a medium that is composed of known chemical components but does not contain crude proteinaceous extracts or by-products such as yeast extract or peptone.

[0092] “Disulfide bond” means a covalent bond between two cysteine amino acids derived by the coupling of two thiol groups on their side chains.

[0093] “Double expression cassette” refers to two heterologous polypeptide expression cassettes contained on the same vector.

[0094] “Double transgene peptide expression vector” or “double transgene expression vector” means a yeast expression vector that contains two copies of the heterologous polypeptide expression cassette.

[0095] “DNA” refers to deoxyribonucleic acid, comprising a polymer of one or more deoxyribonucleotides or nucleotides (i.e., adenine [A], guanine [G], thymine [T], or cytosine [C]), which can be arranged in single-stranded or double-stranded form. For example, one or more nucleotides creates a polynucleotide.

[0096] “dNTPs” refers to the nucleoside triphosphates that compose DNA and RNA.

[0097] “ELISA” or “iELISA” means a molecular biology protocol in which the samples are fixed to the surface of a plate and then detected as follows: a primary antibody is applied followed by a secondary antibody conjugated to an enzyme which converts a colorless substrate to colored substrate which can be detected and quantified across samples. During the protocol, antibodies are washed away such that only those that bind to their epitopes remain for detection. The samples, in our hands, are proteins isolated from plants, and ELISA allows for the quantification of the amount of expressed transgenic protein recovered.

[0098] “Enhancer element” refers to a DNA sequence operably linked to a promoter, which can exert increased transcription activity on the promoter relative to the transcription activity that results from the promoter in the absence of the enhancer element.

[0099] “Expression cassette” refers to a segment of DNA that contains one or more (1) promoter and/or enhancer elements; (2) an appropriate mRNA stabilizing polyadenylation signal; and/or (3) the DNA sequence of interest, for example, a polynucleotide encoding a heterologous polypeptide (e.g., a CRBP). Additional elements that can included in an expression cassette are cis-acting elements such as an internal ribosome entry site (IRES); introns; and posttranscriptional regulatory elements.

[0100] “Expression ORF” means a nucleotide encoding a protein complex and is defined as the nucleotides in the ORF.

[0101] “ER” or “Endoplasmic reticulum” is a subcellular organelle common to all eukaryotes where some post translation modification processes occur.

[0102] “ERSP” or “Endoplasmic reticulum signal peptide” is an N-terminus sequence of amino acids that during protein translation of the transgenic mRNA molecule is recognized and bound by a host cell signal-recognition particle, which moves the protein translation ribosome/mRNA complex to the ER in the cytoplasm. The result is the protein translation is paused until it docks with the ER where it continues and the resulting protein is injected into the ER.

[0103] “ersp” refers to a polynucleotide encoding the peptide, ERSP.

[0104] “ER trafficking” means transportation of a cell expressed protein into ER for post-translational modification, sorting and transportation.

[0105] “FECT” means a transient plant expression system using Foxtail mosaic virus with elimination of coating protein gene and triple gene block.

[0106] “GFP” means a green fluorescent protein from the jellyfish Aequorea victoria.

[0107] “High Production peptide” or “HP peptide” means a peptide which is capable of being made, or is “converted,” according to the procedures described herein and which, once converted can be produced at increased yields, or higher rates of production, or in greater than normal amounts, in a biological system. The higher rates of production can be from 20 to 400% or greater than can be achieved with a peptide before conversion, using the same or similar production methods that were used to produce the peptide before conversion.

[0108] “Hybrid peptide,” aka “hybrid toxin,” aka “hybrid-ACTX-Hv1a,” aka “native hybrid ACTX-Hv1a,” as well as “U peptide,” aka “U toxin,” aka “native U,” aka “U-ACTX-Hv1a,” aka “native U-ACTX-Hv1a,” all refer to an ACTX peptide, which was discovered from a spider known as the Australian Blue Mountains Funnel-web Spider, Hydronyche versuta, and is a positive allosteric modulators of the nicotinic acetylcholine receptor, and may also be a dual antagonist to insect voltage-gated Ca²⁺ channels and voltage-gated K⁺ channels. See Chambers et al., Insecticidal spider toxins are high affinity positive allosteric modulators of the nicotinic acetylcholine receptor. FEBS Lett. 2019 June; 593(12):1336-1350; and Windley et al., Lethal effects of an insecticidal spider venom peptide involve positive allosteric modulation of insect nicotinic acetylcholine receptors. Neuropharmacology. 2017 December; 127:224-242, the disclosures of which are incorporated herein by reference in their entireties.

[0109] “IGER” means a name for a short peptide, based on its actual sequence of one letter codes. It is an example of an intervening linker.

[0110] “ICK motif,” or “ICK motif protein,” or “inhibitor cystine knot motif,” or “Toxic insect ICK peptides,” or “ICK peptides,” or “CK” peptides,” or “cystine knot motif,” or “cystine knot peptides,” refers to a 16 to 60 amino acid peptide with at least 6 half-cystine core amino acids having three disulfide bridges, wherein the 3 disulfide bridges are covalent bonds and of the six half-cystine residues the covalent disulfide bonds are between the first and fourth, the second and fifth, and the third and sixth half-cystines, of the six core half-cystine amino acids starting from the N-terminal amino acid. In general this type of peptide comprises a beta-hairpin secondary structure, normally composed of residues situated between the fourth and sixth core half-cystines of the motif, the hairpin being stabilized by the structural crosslinking provided by the motif's three disulfide bonds. Note that additional cysteine/cystine or half-cystine amino acids may be present within the inhibitor cystine knot motif. Examples are provided in the sequence listing.

[0111] “ick” means a nucleotide encoding an ICK motif protein.

[0112] “ICK motif protein expression ORF” or “expression ORF” means a nucleotide encoding an ICK motif protein complex and is defined as the nucleotides in the ORF.

[0113] “ICK motif protein expression vector” or “ICK expression vector,” or “ICK motif expression vector,” means a binary vector which contains an expression ORF. The binary vector also contains the necessary transcription promoter and terminator sequence surrounding the expression ORF to promote expression of the ORF and the protein it encodes.

[0114] “Insect” means any arthropod and nematode, including acarids, and insects known to infest all crops, vegetables, and trees and includes insects that are considered pests in the fields of forestry, horticulture and agriculture. Examples of specific crops that might be protected with the methods disclosed herein are soybean, corn, cotton, alfalfa and the vegetable crops. A list of specific crops and insects appears towards the end of this document.

[0115] As used herein, the term “insecticidal” is generally used to refer to the ability of a polypeptide or protein used herein, to increase mortality or inhibit growth rate of insects. As used herein, the term “nematicidal” refers to the ability of a polypeptide or protein used herein, to increase mortality or inhibit the growth rate of nematodes. In general, the term “nematode” comprises eggs, larvae, juvenile and mature forms of said organism.

[0116] “Insect gut environment” or “gut environment” means the specific pH and proteinase conditions found within the fore, mid or hind gut of an insect or insect larva.

[0117] “Insect hemolymph environment” means the specific pH and proteinase conditions of found within an insect or insect larva.

[0118] “Insecticidal activity” means that on or after exposure of the insect to compounds or peptides, the insect either dies, stops or slows its movement or its feeding, stops or slows its growth, fails to pupate, cannot reproduce or cannot produce fertile offspring.

[0119] “Insecticidal peptide” or “Insecticidal protein” or “toxic peptide” or “toxic protein” means a protein having insecticidal activity when ingested by, in contact with, or injected into an insect. For example, “Insecticidal protein” can refer to any protein, peptide, polypeptide, amino acid sequence, configuration, or arrangement, comprising one or more insecticidal peptides. For example, an insecticidal protein can refer to an ICK; or an ICK fused with one or more proteins such as a stabilizing domain (STA); an endoplasmic reticulum signaling protein (ERSP); an insect cleavable or insect non-cleavable linker; or an ICK fused to one or more ICKs; and/or any other combination thereof.

[0120] “Insecticidal peptide production strain screen” means a screening process that identifies the higher-yielding insecticidal peptide production yeast strains from the lower yielding strains. In the described methods herein, it refers to screens that use reverse-phase HPLC or the housefly injection bioassay.

[0121] “Integrative expression vector or integrative vector” means a yeast expression vector which can insert itself into a specific locus of the yeast cell genome and stably becomes a part of the yeast genome.

[0122] “Intervening linker” means a short peptide sequence in the protein separating different parts of the protein, or a short DNA sequence that is placed in the reading frame in the ORF to separate the upstream and downstream DNA sequences such that during protein translation the proteins encoded in the DNA can achieve their independent secondary and tertiary structure formation. The intervening linker can be either resistant or susceptible to cleavage in plant cellular environments, in the insect and/or lepidopteran gut environment, and in the insect hemolymph and lepidopteran hemolymph environment.

[0123] “Knockdown dose 50” or “KD₅₀” refers to the median dose required to cause paralysis or cessation of movement in 50% of a population, for example a population of Musca domestica (common housefly) and/or Aedes aegypti (mosquito).

[0124] “Known peptide” means a peptide known to have biological activity and may be a mature peptide or any version or fragment thereof including pre and pro peptides and conjugates of active peptides. A preferred known peptide is one with insecticidal activity.

[0125] “L” in the proper context means an intervening linker peptide, which links a translational stabilizing protein with an ICK motif protein or a multiple ICK motif protein domain, and links same or different multiple ICK motif protein. When referring to amino acids, “L” can also mean leucine.

[0126] “LAC4 promoter” or “Lac4 promoter” refers to a DNA segment comprised of the promoter sequence derived from the K. lactis β-galactosidase gene. The LAC4 promoters is strong and inducible reporter that is used to drive expression of exogenous genes transformed into yeast.

[0127] “LAC4 terminator” or “Lac4 terminator” refers to a DNA segment comprised of the transcriptional terminator sequence derived from the K. lactis β-galactosidase gene.

[0128] “LD₅₀” refers to lethal dose 50 which means the dose required to kill 50% of a population.

[0129] “Linker,” or “LINKER” or in some contexts “L” refers to a short peptide sequence comprising a binary or tertiary region, wherein each region is cleavable by at least two types of proteases: one of which is an insect and/or nematode protease and the other one of which is a human protease, such that the linker can be separated by both types of protease that can cleave and separate the protein into two parts or a short DNA sequence that is placed in the reading frame in the ORF and encoding a short peptide sequence in the protein that is the target site of an insect and/or nematode and an animal (e.g. human) protease that can cleave and separate the protein into two parts. In some embodiments, the linker links a translational stabilizing protein with an ICK motif protein or a multiple ICK motif protein domain, and links same or different multiple ICK motif proteins. The linker can have one of (at least) three roles: to cleave in the insect gut environment, to cleave in the plant cell, or to be designed not to intentional cleave.

[0130] “l” or linker” means a nucleotide coding for an intervening linker peptide.

[0131] “Lepidopteran gut environment” means the specific pH and proteinase conditions of found within the fore, mid or hind gut of a lepidopteran insect or larva.

[0132] “Lepidopteran hemolymph environment” means the specific pH and proteinase conditions of found within lepidopteran insect or larva.

[0133] “Motif” refers to a polynucleotide or polypeptide sequence that is implicated in having some biological significance and/or exerts some effect or is involved in some biological process.

[0134] “Multiple cloning site” or “MCS” refers to a segment of DNA found on a vector that contains numerous restriction sites in which a DNA sequence of interest can be inserted.

[0135] “Multiple ICK motif protein domain” means a protein composed of multiple ICK motif proteins which are linked by multiple intervening linker peptides. The ICK motif proteins in the multiple ICK motif protein domain can be same or different, and the intervening linker peptides in this domain can also be the same or different.

[0136] “Mutant” refers to an organism, DNA sequence, peptide sequence, or polypeptide sequence, that has an alteration (for example, in the DNA sequence), which causes said organism and/or sequence to be different from the naturally occurring or wild-type organism and/or sequence.

[0137] “N-terminal” refers to the free amine group (i.e., —NH₂) that is positioned on beginning or start of a polypeptide.

[0138] “Non-ICK CRIPS” can have 4-8 cysteines which form 2-4 disulfide bonds. Non-ICK peptides include cystine knot peptides that are not ICK peptides. Non-ICK peptides may have different connection orders of the cystine bonds than ICKs. Examples of a Non-ICK CRIP are peptides like Av2 and Av3 which are peptides first identified from sea anemones. These anemone peptides are examples of a class of compounds that modulate sodium channels in the insect peripheral nervous system (PNS).

[0139] “Non-Polar amino acid” is an amino acid that is weakly hydrophobic and includes glycine, alanine, proline, valine, leucine, isoleucine, phenylalanine and methionine. Glycine or gly is the most preferred non-polar amino acid for the dipeptides of this invention.

[0140] “Normalized peptide yield” means the peptide yield in the conditioned medium divided by the corresponding cell density at the point the peptide yield is measured. The peptide yield can be represented by the mass of the produced peptide in a unit of volume, for example, mg per liter or mg/L, or by the UV absorbance peak area of the produced peptide in the HPLC chromatograph, for example, mAu·sec. The cell density can be represented by visible light absorbance of the culture at wavelength of 600 nm (OD600).

[0141] “One letter code” means the peptide sequence which is listed in its one letter code to distinguish the various amino acids in the primary structure of a protein. alanine=A, arginine=R, asparagine=N, aspartic acid=D, asparagine or aspartic acid=B, cysteine=C, glutamic acid=E, glutamine=Q, glutamine or glutamic acid=Z, glycine=G, histidine=H, isoleucine=I, leucine=L, lysine=K, methionine=M, phenylalanine=F, proline=P, serine=S, threonine=T, tryptophan=W, tyrosine=Y, valine=V.

[0142] “Omega peptide” aka “omega toxin,” aka “omega-ACTX-Hv1a,” aka “native omegaACTX-Hv1a,” all refer to an ACTX peptide which was first isolated from a spider known as the Australian Blue Mountains Funnel-web Spider, Haydronyche versuta. Omega peptide is a positive allosteric modulators of the nicotinic acetylcholine receptor, and may also be a dual antagonist to insect voltage-gated Ca²⁺ channels and voltage-gated K⁺ channels. See Chambers et al., Insecticidal spider toxins are high affinity positive allosteric modulators of the nicotinic acetylcholine receptor. FEBS Lett. 2019 June; 593(12):1336-1350; and Windley et al., Lethal effects of an insecticidal spider venom peptide involve positive allosteric modulation of insect nicotinic acetylcholine receptors. Neuropharmacology. 2017 December; 127:224-242, the disclosures of which are incorporated herein by reference in their entireties.

[0143] “ORF” or “Open reading frame” or “peptide expression ORF” means that DNA sequence encoding a protein which begins with an ATG start codon and ends with a TGA, TAA or TAG stop codon. ORF can also mean the translated protein that the DNA encodes.

[0144] “Operably linked” means that the two adjacent DNA sequences are placed together such that the transcriptional activation of one can act on the other. “Operably linked” with regard to peptide and/or polypeptide molecules means that two or more peptide and/or polypeptide molecules are connected in such a way as to yield a single polypeptide chain, or connected in such a way inasmuch that one peptide exerts some effect on the other.

[0145] “PEP” means Plant Expressed Peptide.

[0146] “Peptide expression cassette”, or “expression cassette” means a DNA sequence which is composed of all the DNA elements necessary to complete transcription of an insecticidal peptide in a biological expression system. In the described methods herein, it includes a transcription promoter, a DNA sequence to encode an α-mating factor signal sequence and a Kex 2 cleavage site, an insecticidal peptide transgene, a stop codon and a transcription terminator.

[0147] “Peptide expression vector” means a host organism expression vector which contains a heterologous insecticidal peptide transgene.

[0148] “Peptide expression yeast strain”, “peptide expression strain” or “peptide production strain” means a yeast strain which can produce a heterologous insecticidal peptide.

[0149] “Peptide made special” means a peptide previously having low peptide yield from a biological expression system that becomes an HP peptide because of the methods described herein used to increase its yield.

[0150] “Peptide transgene” or “insecticidal peptide transgene” means a DNA sequence that encodes an insecticidal peptide and can be translated in a biological expression system.

[0151] “Peptide yield” means the insecticidal peptide concentration in the conditioned medium which is produced from the cells of a peptide expression yeast strain. It can be represented by the mass of the produced peptide in a unit of volume, for example, mg per liter or mg/L, or by the UV absorbance peak area of the produced peptide in the HPLC chromatograph, for example, mAu·sec.

[0152] “Peritrophic membrane” means a lining inside the insect gut that traps large food particles can aid in their movement through the gut while allowing digestion, but also protecting the gut wall.

[0153] “Pest” includes, but is not limited to: insects, fungi, bacteria, nematodes, mites, ticks, and the like.

[0154] “Pesticidally-effective amount” refers to an amount of the pesticide that is able to bring about death to at least one pest, or to noticeably reduce pest growth, feeding, or normal physiological development. This amount will vary depending on such factors as, for example, the specific target pests to be controlled, the specific environment, location, plant, crop, or agricultural site to be treated, the environmental conditions, and the method, rate, concentration, stability, and quantity of application of the pesticidally-effective polypeptide composition. The formulations may also vary with respect to climatic conditions, environmental considerations, and/or frequency of application and/or severity of pest infestation.

[0155] “PFIP” or “pore forming insecticidal protein” means a protein that can form a pore or channel in the cells that line an insect gut, such as gut epithelium cells. Examples of PFIPS are Bt proteins such as cry, crt and VIP. Other PFIP examples can be found in the sequence listing.

[0156] “Plant transgenic protein” means a protein from a heterologous species that is expressed in a plant after the DNA or RNA encoding it was delivered into one or more of the plant cells.

[0157] “Plant” shall mean whole plants, plant tissues, plant organs (e.g., leaves, stems, roots, etc.), seeds, plant cells, propagules, embryos and progeny of the same. Plant cells can be differentiated or undifferentiated (e.g. callus, suspension culture cells, protoplasts, leaf cells, root cells, phloem cells, and pollen).

[0158] “Plant-incorporated protectant” or “PIP” means an insecticidal protein produced by transgenic plants, and the genetic material necessary for the plant to produce the protein.

[0159] “Plant cleavable linker” means a cleavable linker peptide, or a nucleotide encoding a cleavable linker peptide, which contains a plant protease recognition site and can be cleaved during the protein expression process in the plant cell.

[0160] “Plant regeneration media” means any media that contains the necessary elements and vitamins for plant growth and plant hormones necessary to promote regeneration of a cell into an embryo which can germinate and generate a plantlet derived from tissue culture. Often the media contains a selectable agent to which the transgenic cells express a selection gene that confers resistance to the agent.

[0161] “Plant transgenic protein” means a protein from a heterologous species that is expressed in a plant after the DNA or RNA encoding it was delivered into one or more of the plant cells.

[0162] “Plasmid” refers to a DNA segment that acts as a carrier for a gene of interest (e.g. a gene encoding a heterologous polypeptide of interest) and, when transformed or transfected into an organism, can replicate and express the DNA sequence contained within the plasmid independently of the host organism. Plasmids are a type of vector, and can be “cloning vectors” (i.e., simple plasmids used to clone a DNA fragment and/or select a host population carrying the plasmid via some selection indicator) or “expression plasmids” (i.e., plasmids used to produce large amounts of polynucleotides and/or polypeptides).

[0163] “Polar amino acid” is an amino acid that is polar and includes serine, threonine, cysteine, asparagine, glutamine, histidine, tryptophan and tyrosine; preferred polar amino acids are serine, threonine, cysteine, asparagine and glutamine; with serine being most highly preferred.

[0164] “Post-transcriptional gene silencing”, or “PTGS”, means a cellular process within living cells that suppress the expression of a gene.

[0165] “Post-transcriptional regulatory elements” are DNA segments and/or mechanisms that affect mRNA after it has been transcribed. Mechanisms of post-transcriptional mechanisms include splicing events; capping, splicing, and addition of a Poly (A) tail, and other mechanisms known to those having ordinary skill in the art.

[0166] “Protein” has the same meaning as “peptide” and/or “polypeptide” in this document.

[0167] “Recombinant DNA” or “rDNA” refers to DNA that is comprised of two or more different DNA segments.

[0168] “Recombinant vector” means a DNA plasmid vector into which foreign DNA has been inserted.

[0169] “Regulatory elements” refers to promoters; enhancers; internal ribosomal entry sites (IRES); polyadenylation signals; poly-U sequences; and/or other elements that influence gene expression, for example, in a tissue-specific manner; temporal-dependent manner; to increase or decrease expression; and/or to cause constitutive expression.

[0170] “Restriction enzyme” or “restriction endonuclease” refers to an enzyme that cleaves DNA at a specified restriction site. For example, a restriction enzyme can cleave a plasmid at an EcoRI, SacII or BstXI restriction site allowing the plasmid to be linearized, and the DNA of interest to be ligated.

[0171] “Restriction site” refers to a location on DNA comprising a sequence of 4 to 8 nucleotides, and whose sequence is recognized by a particular restriction enzyme.

[0172] “Secondary invertebrate pest control agent (SIPCA)” refers to additional agents that can be combined in a composition with a primary agent (e.g., an ICK or an insecticidal protein comprising one or more ICKs), and that exert insecticidal, nematicidal, and/or otherwise pesticidal effects on target insects.

[0173] “Selection gene” means a gene which confers an advantage for a genomically modified organism to grow under the selective pressure.

[0174] “Subcloning” or “subcloned” refers to the process of transferring DNA from one vector to another, usually advantageous vector. For example, polynucleotide encoding a mutant Av3 polypeptide can be subcloned into a pLB102 plasmid subsequent to selection of yeast colonies transformed with pKLAC1 plasmids.

[0175] “SSI” or “site-specific integration” refers to the process directing a transgene to a target site in a host-organism's genome; thus, SSI allows the integration of genes of interest into pre-selected genome locations of a host-organism.

[0176] “STA” or “Translational stabilizing protein” or “stabilizing protein” or “fusion protein” means a protein with sufficient tertiary structure that it can accumulate in a cell without being targeted by the cellular process of protein degradation. The protein can be between 5 and 50 amino acids (e.g., another ICK-motif protein), 50 to 250 amino acids (GNA), 250 to 750 amino acids (e.g., chitinase) and 750 to 1500 amino acids (e.g., enhancin). The translational stabilizing protein is coded by a DNA sequence for a protein that is operably linked with a sequence encoding an insecticidal protein in the ORF. The operably-linked STA can either be upstream or downstream of the insecticidal protein and can have any intervening sequence between the two sequences as long as the intervening sequence does not result in a frame shift of either DNA sequence. The translational stabilizing protein can also have an activity which increases delivery of the ICK motif protein across the gut wall and into the hemolymph of the insect. Such a delivery can be achieved by actively trafficking the entire ORF across the gut wall, or by cleavage within the gut environment to separate the ICK motif protein while the translational stabilizing protein damages the peritrophic membrane and/or gut wall to increase diffusion of the ICK motif protein into the hemolymph.

[0177] “sta” means a nucleotide encoding a translational stabilizing protein.

[0178] “Structural motif” refers to the three-dimensional arrangement of peptides and/or polypeptides, and/or the arrangement of operably linked polypeptide segments. For example, the polypeptide comprising ERSP-STA-L-ICK has an ERSP motif, an STA motif, a LINKER motif, and an ICK polypeptide motif.

[0179] “TMOF” or “TMOF motif” or “TMOF proteins” means “trypsin modulating oostatic factor” protein sequences. Examples are provided in the sequence listing. Numerous examples and variants are provided herein. SEQ ID NO: 708 is the wild type TMOF sequence. Other non-limiting variants are provided in SEQ. ID. NOs: 709-721. Other examples would be known or could be created by one skilled in the art.

[0180] “Transfection” and “transformation” both refer to the process of introducing exogenous and/or heterologous DNA or RNA (e.g., a vector containing a polynucleotide that encodes a heterologous polypeptide of interest) into a host organism (e.g., a prokaryote or a eukaryote). Generally, those having ordinary skill in the art sometimes reserve the term “transformation” to describe processes where exogenous and/or heterologous DNA or RNA are introduced into a bacterial cell; and reserve the term “transfection” for processes that describe the introduction of exogenous and/or heterologous DNA or RNA into eukaryotic cells. However, as used herein, the term “transformation” and “transfection” are used synonymously, regardless of whether a process describes the introduction exogenous and/or heterologous DNA or RNA into a prokaryote (e.g., bacteria) or a eukaryote (e.g., yeast, plants, or animals).

[0181] “Transgene” means a heterologous DNA sequence encoding a protein which is transformed into a plant.

[0182] “Transgenic host cell” means a cell which is transformed with a gene and has been selected for its transgenic status via an additional selection gene.

[0183] “Transgenic plant” means a plant that has been derived from a single cell that was transformed with foreign DNA such that every cell in the plant contains that transgene.

[0184] “Transient expression system” means an Agrobacterium tumefaciens-based system which delivers DNA encoding a disarmed plant virus into a plant cell where it is expressed. The plant virus has been engineered to express a protein of interest at high concentrations, up to 40% of the TSP. In the technical proof, there are two transient expression systems used, a TRBO and a FECT system and the plant cells are leaf tissue of a tobacco plant “Nicotiana benthamiana.”

[0185] “TRBO” means a transient plant expression system using Tobacco mosaic virus with removal of the viral coating protein gene.

[0186] “Trypsin cleavage” means an in vitro assay that uses the protease enzyme trypsin (which recognizes exposed lysine and arginine amino acid residues) to separate a cleavable linker at that cleavage site. It also means the act of the trypsin enzyme cleaving that site.

[0187] “TSP” or “total soluble protein” means the total amount of protein that can be extracted from a plant tissue sample and solubilized into the extraction buffer.

[0188] “U peptide,” U protein” aka “U toxin,” aka “native U,” aka “U-ACTX-Hv1a,” aka “native U-ACTX-Hv1a,” as well as “Hybrid peptide,” aka “hybrid toxin,” aka “hybrid-ACTX-Hv1a,” aka “native hybridACTX-Hv1a,” all refer to a native protein or native toxin, that can be found in nature or is otherwise known, in the case of “U-ACTX-Hv1a,” aka “native U-ACTX-Hv1a,” the protein is a native spider toxin, that was first discovered from a spider with origins in the Australian Blue Mountains and is a positive allosteric modulators of the nicotinic acetylcholine receptor, and may also be a dual antagonist to insect voltage-gated Ca²⁺ channels and voltage-gated K⁺ channels. See Chambers et al., Insecticidal spider toxins are high affinity positive allosteric modulators of the nicotinic acetylcholine receptor. FEBS Lett. 2019 June; 593(12):1336-1350; and Windley et al., Lethal effects of an insecticidal spider venom peptide involve positive allosteric modulation of insect nicotinic acetylcholine receptors. Neuropharmacology. 2017 December; 127:224-242, the disclosures of which are incorporated herein by reference in their entireties. The spider from which the toxin was discovered is known as the Australian Blue Mountains Funnel-web Spider, which has the scientific name Haydronyche versuta.

[0189] “U+2 peptide,” “U+2 protein”, “U+2 toxin,” or “U+2,” or “U+2-ACTX-Hv1a,” all refer to either a toxin, which has an additional dipeptide operatively linked to the native peptide, and may refer to the spider toxin which is sometimes called the U peptide and other names noted above. The additional dipeptide that is operatively linked to the U peptide and thus indicated as “+2” or “plus 2” can be selected among several peptides, any of which may result in a “U+2 peptide” with unique properties as discussed herein. These are also sometimes called “high production peptides.” When the term “U+2-ACTX-Hv1a” is used, it refers to a specific high production toxic peptide, comprising a naturally occurring peptide from the Australian Blue Mountains Funnel-web Spider, which has the scientific name Hydronyche versuta.

[0190] “Vector” refers to the DNA segment that accepts a foreign gene of interest (e.g., ick). The gene of interest is known as an “insert” or “transgene.”

[0191] “VIP” proteins were discovered from screening the supernatant of vegetatively gown strains of Bt for possible insecticidal activity. They have little or no similarity to cry proteins and they were named Vegetative Insecticidal Proteins or VIP. Of particular use and preference for use with this document are what have been called VIP3, Vip3 proteins or Vip toxins which have Lepidopteran activity. They are thought to have a similar mode of action as Bt cry peptides. In this document VIP proteins are categorized as a PFIP type of protein.

[0192] “Wild type” or “WT” refers to the phenotype and/or genotype (i.e., the appearance or sequence) of an organism, polynucleotide sequence, and/or polypeptide sequence, as it is found and/or observed in its naturally occurring state or condition.

[0193] “Yeast expression vector,” or “expression vector”, or “vector,” means a plasmid which can introduce a heterologous gene and/or expression cassette into yeast cells to be transcribed and translated.

[0194] “Yield” refers to the production of a peptide, and increased yields can mean increased amounts of production, increased rates of production, and an increased average or median yield and increased frequency at higher yields. The term “yield” when used in reference to plant crop growth and/or production, as in “yield of the plant” refers to the quality and/or quantity of biomass produced by the plant.

[0195] Throughout this specification, unless specifically stated otherwise or the context requires otherwise, reference to a single step, composition of matter, group of steps or group of compositions of matter shall be taken to encompass one and a plurality (i.e., one or more) of those steps, compositions of matter, groups of steps or group of compositions of matter.

[0196] The present disclosure is performed without undue experimentation using, unless otherwise indicated, conventional techniques of molecular biology, microbiology, virology, recombinant DNA technology, solid phase and liquid nucleic acid synthesis, peptide synthesis in solution, solid phase peptide synthesis, immunology, cell culture, and formulation. Such procedures are described, for example, in Sambrook, Fritsch & Maniatis, Molecular Cloning: A Laboratory Manual, Cold Spring Harbor Laboratories, New York, Second Edition (1989), whole of Vols I, II, and III; DNA Cloning: A Practical Approach, Vols. I and II (D. N. Glover, ed., 1985), IRL Press, Oxford, whole of text; Oligonucleotide Synthesis: A Practical Approach (M. J. Gait, ed, 1984) IRL Press, Oxford, whole of text, and particularly the papers therein by Gait, pp 1-22; Atkinson et al, pp 35-81; Sproat et al, pp 83-115; and Wu et al, pp 135-151; 4. Nucleic Acid Hybridization: A Practical Approach (B. D. Hames & S. J. Higgins, eds., 1985) IRL Press, Oxford, whole of text; Immobilized Cells and Enzymes: A Practical Approach (1986) IRL Press, Oxford, whole of text; Perbal, B., A Practical Guide to Molecular Cloning (1984); Methods In Enzymology (S. Colowick and N. Kaplan, eds., Academic Press, Inc.), whole of series; J. F. Ramalho Ortigao, “The Chemistry of Peptide Synthesis” In: Knowledge database of Access to Virtual Laboratory website (Interactiva, Germany); Sakakibara, D., Teichman, J., Lien, E. Land Fenichel, R. L. (1976). Biochem. Biophys. Res. Commun. 73 336-342; Merrifield, R. B. (1963). J. Am. Chem. Soc. 85, 2149-2154; Barany, G. and Merrifield, R. B. (1979) in The Peptides (Gross, E. and Meienhofer, 3. eds.), vol. 2, pp. 1-284, Academic Press, New York. 12. Wiinsch, E., ed. (1974) Synthese von Peptiden in Houben-Weyls Metoden der Organischen Chemie (Muler, E., ed.), vol. 15, 4th edn., Parts 1 and 2, Thieme, Stuttgart; Bodanszky, M. (1984) Principles of Peptide Synthesis, Springer-Verlag, Heidelberg; Bodanszky, M. & Bodanszky, A. (1984) The Practice of Peptide Synthesis, Springer-Verlag, Heidelberg; Bodanszky, M. (1985) Int. J. Peptide Protein Res. 25, 449-474; Handbook of Experimental Immunology, Vols. I-IV (D. M. Weir and C. C. Blackwell, eds., 1986, Blackwell Scientific Publications); and Animal Cell Culture: Practical Approach, Third Edition (John R. W. Masters, ed., 2000); each of these references are incorporated herein by reference in their entireties.

[0197] Throughout this specification, unless the context requires otherwise, the word “comprise”, or variations such as “comprises” or “comprising”, will be understood to imply the inclusion of a stated step or element or integer or group of steps or elements or integers but not the exclusion of any other step or element or integer or group of elements or integers.

### PART I. PLANT INCORPORATED PEPTIDES OR PLANT EXPRESSED PEPTIDES “PIPS” AND PEPS”

[0198] Plant-incorporated protectants, or “PIPs” have presented one solution to the insect pressure faced by farmers. Modern agriculture employs genes from the Bacillus thuringiensis expressed as plant transgenic proteins to act as PIPs, but natural resistant insect strains have been detected in the field and threaten this class. Additional PIPs with novel modes of action need to be developed to manage the development of resistance. A novel class of proteins with insecticidal activity having the potential to become PIPs, are called Cysteine Rich Insecticidal Proteins (CRIPS) these proteins have 4, 6 or 8 cysteines and 2, 3 or 4 disulfide bonds. One example of this class of compounds are said to be of the type called inhibitor cysteine knot (ICK) motif protein. ICK motif proteins that have insecticidal activity have potential to be insecticidal proteins and PIPs.

[0199] ICK motif proteins are a class of proteins with at least six cysteine residues that form a specific ICK tertiary structure. Covalent cross-linking of the cysteine residues in the ICK motif proteins form disulfide bridges that result in a tertiary structures that makes the protein relatively resistant to proteases and sometimes to extreme physical conditions (pH, temperature, UV light, etc.), and confers activity against ion channels, which might specific to insects. Many ICK motif proteins have evolved in the venom of invertebrates and vertebrates that use the ICK motif proteins as a toxin to immobilize or kill their predators or prey. Such insecticidal peptides often have scorpion, spider and sometimes snake origins. In nature, toxic peptides can be directed to the insect's gut or to internal organs by injection. In the case of a PIP, the delivery is usually via the insect's consumption of transgenic protein expressed in plant tissue. Upon this consumption of the toxin from its food, for example an insect feeding upon a transgenic plant, the ICK motif protein may have the ability to inhibit the growth, impair the movement, or even kill an insect.

[0200] Toxic peptides however often lose their toxicity when they are expressed in plants. Unless the ICK motif protein is expressed as a properly folded protein it cannot successfully protect a plant or crop from insect damage. In some cases a plant expressed peptide will need to be activated by cleavage within the insect or during expression process in a plant in order to be active. There is a need for methods and modified peptides and nucleic acids that enable peptides to not only be expressed in a plant but to be expressed, folded properly and in some cases cleaved properly such that the peptide retains its activity against an insect even after expression in a plant. In this section we present several ways to produce active peptides adapted for expression in plants.

[0201] We describe various combinations of different peptides operably linked together to make novel protein complexes. The following protein complexes are described. A peptide comprised of an Endoplasmic Reticulum Signal Peptide (ERSP) operably linked to Cysteine Rich Insecticidal Peptide (CRIP) such as an Inhibitor Cystine Knot (ICK) motif protein, which is designated as ERSP-ICK, wherein said ERSP is the N-terminal of said peptide, and where the ERSP peptide is between 3 to 60 amino acids in length, between 5 to 50 amino acids in length, between 20 to 30 amino acids in length and or where the peptide is BAAS, or tobacco extensin signal peptide, or a modified tobacco extensin signal peptide, or Jun a 3 signal peptide of Juniperus ashei or J ashei.

[0202] A peptide comprised of an Endoplasmic Reticulum Signal Peptide (ERSP) operably linked to a Cysteine Rich Insecticidal Peptide (CRIP) such as an Inhibitor Cystine knot (ICK) motif protein, which is designated as ERSP-ICK, wherein the ICK motif protein is between 16 and 60 amino acids in length, between 26 and 48 amino acids in length, between 30 and 44 amino acids in length and or where the ICK motif protein is U-ACTX-Hv1a, or Omega-ACTX-Hv1a, or Kappa-ACTX-Hv1c.

[0203] A peptide comprised of an Endoplasmic Reticulum Signal Peptide (ERSP) operably linked to an Inhibitor Cystine knot (ICK) motif protein, designated as ERSP-ICK, wherein said ERSP and Inhibitor Cystine knot (ICK) motif protein are combinations of any of the sizes and lengths described herein and/or are comprised of any of the identified sequences taught in this document.

[0204] A nucleotide that codes for any of the peptides that are described herein as Endoplasmic Reticulum Signal Peptides (ERSP) and/or Cysteine Rich Insecticidal Peptide (CRIP) such as an Inhibitor Cystine Knot (ICK) motif proteins. An expression ORF comprising any of the nucleotides that code for these peptides. An expression ORF comprising any of the nucleotides that code for these peptides transformed into a transgenic plant genome. A peptide wherein said ICK motif protein is an insecticidal protein. A peptide wherein said insecticidal peptide is any of the ICK motif proteins or peptide described herein. A peptide wherein said insecticidal peptide is any peptide selected from any of the peptides or sources of peptides including Atrax or Hadronyche. An insecticidal peptide selected from any of the peptides in the Sequence Listing and fragments thereof including mature, pre, and pro peptide versions of said peptides and sequence numbers. A peptide wherein said insecticidal peptide is any peptide selected described or selected from an ACTX protein. A TMOF protein.

[0205] The use of any of the peptides or nucleotides described herein to make or transform a plant or plant genome in order to express properly folded toxic peptides in a transformed plant. The use of any of the peptides or nucleotides described herein to make or transform a plant or plant genome in order to express properly folded toxic peptides in the transformed plant and to cause the accumulation of the expressed and properly folded toxic peptides in said plant and to cause an increase the plant's resistance to insect damage.

[0206] A method of using the nucleotides of any of the peptides or expression ORFs in a CRIP, an ICK a Non-ICK, motif protein expression vectors to create transgenic plants. An ICK motif protein expression vector comprising any of the nucleotides which express any peptides described herein. An ICK motif protein expression vector incorporated into a transformed plant, comprising nucleotides that code for any of the peptides disclosed herein or that could be made by one skilled in the art given the teaching disclosed herein. A procedure for the generation of transformed plants having or expressing any of the peptides described herein. A plant made by any of the products and processes described herein.

[0207] A protein comprised of an Endoplasmic Reticulum Signal Peptide (ERSP) operably linked to an Inhibitor Cystine knot (ICK) motif protein or cysteine rich peptide, operably linked to an intervening linker peptide (L or Linker), which is designated as ERSP-Linker-ICK, (ERSP-L-ICK), or ERSP-ICK-Linker (ERSP-ICK-L), wherein said ERSP is the N-terminal of said protein and said L or Linker, may be either on the N-terminal side (upstream) of the ICK motif protein or the C-terminal side (downstream) of the ICK motif protein. A protein designated as ERSP-L-ICK, or ERSP-ICK-L, comprising any of the ERSPs or ICK motif proteins described herein and wherein said L can be an uncleavable linker peptide, or a cleavable linker peptide, which may be cleavable in a plant cells during protein expression process or may be cleavable in an insect gut environments and hemolymph environments, and comprised of any of the intervening linker peptide (LINKER) described, or taught by this document including the following sequences: IGER (SEQ ID NO: 1) EEKKN, (SEQ ID NO: 2) and ETMFKHGL (SEQ ID NO: 3).

[0208] A nucleotide that codes for any of the peptides described as Endoplasmic Reticulum Signal Peptide (ERSP), Inhibitor Cystine knot (ICK) motif protein and or intervening linker peptide (LINKER) and any and all nucleotides that code for any of these proteins that are used to create transgenic plants.

[0209] The use of any of the peptides or nucleotides that code for Endoplasmic Reticulum Signal Peptide (ERSP), Inhibitor Cystine knot (ICK) motif protein and/or intervening linker peptide (LINKER) to make or transform a plant or plant genome in order to express properly folded toxic peptides in a transformed plant. The use of any of the peptides or nucleotides that code for Endoplasmic Reticulum Signal Peptide (ERSP), Inhibitor Cystine knot (ICK) motif protein and/or intervening linker peptide to make or transform a plant or plant genome in order to express properly folded toxic peptides in the transformed plant and to cause the accumulation of the expressed and properly folded toxic peptides in said plant and to cause an increase the plant's resistance to insect damage.

[0210] A method of using the nucleotides or expression ORFs that code for Endoplasmic Reticulum Signal Peptide (ERSP), Inhibitor Cystine knot (ICK) motif protein and/or intervening linker peptide (LINKER) to create transgenic plants. An expression ORF comprising any of the nucleotides which are in an ICK expression vector express any peptides described herein. ERSP, ICK motif protein and/or LINKER. A functional expression ORF in an ICK motif protein expression vector incorporated into a transformed plant, comprising nucleotides that code for any of the peptides disclosed herein that code for ERSP, ICK motif protein and/or LINKER or that could be made by one skilled in the art given the teaching disclosed herein. A procedure for the generation of transformed plants having or expressing any of the peptides described herein. ERSP, ICK motif protein and/or LINKER. A plant made by any of the products and processes described herein.

[0211] A protein comprised of an Endoplasmic Reticulum Signal Peptide (ERSP) operably linked to an Inhibitor Cystine knot (ICK) motif protein operably linked to a Translational Stabilizing Protein (STA), which is designated as ERSP-STA-ICK or ERSP-ICK-STA, wherein said ERSP is the N-terminal of said protein and said STA may be either on the N-terminal side (upstream) of the ICK motif protein of the C-terminal side (downstream) of the ICK motif protein. A protein designated as ERSP-STA-ICK or ERSP-ICK-STA, comprising any of the ERSPs or ICK motif proteins described herein and where STA is comprised of any of the translational stabilizing proteins described, or taught by this document including GFP (Green Fluorescent Protein), GNA (snowdrop lectin), Jun a 3, (Juniperus ashei) and many other ICK motif proteins.

[0212] A nucleotide that codes for any of the peptides described as Endoplasmic Reticulum Signal Peptide (ERSP), Inhibitor Cystine knot (ICK) motif protein and/or Translational Stabilizing Protein (STA) and any and all nucleotides having any of these functional groups that code for any of these proteins that are used to create transgenic plants.

[0213] The use of any of the peptides or nucleotides that code for Endoplasmic Reticulum Signal Peptide (ERSP), Inhibitor Cystine knot (ICK) motif protein and/or Translational Stabilizing Protein (STA) to make or transform a plant or plant genome in order to express properly folded toxic peptides in a transformed plant. The use of any of the peptides or nucleotides that code for Endoplasmic Reticulum Signal Peptide (ERSP), Inhibitor Cystine knot (ICK) motif protein and/or Translational Stabilizing Protein (STA) to make or transform a plant or plant genome in order to express properly folded toxic peptides in the transformed plant and to cause the accumulation of the expressed and properly folded toxic peptides in said plant and to cause an increase the plant's resistance to insect damage.

[0214] A method of using the nucleotides or expression ORFs that code for Endoplasmic Reticulum Signal Peptide (ERSP), Inhibitor Cystine knot (ICK) motif protein and/or Translational Stabilizing Protein (STA) in an ICK expression vector to create transgenic plants. An expression ORF comprising any of the nucleotides which express ERSP, ICK motif protein and/or STA. A functional expression ORF in an ICK motif protein expression vector that is incorporated into a transformed plant, comprising nucleotides that code for that code for ERSP, ICK motif protein and/or STA or that could be made by one skilled in the art given the teaching disclosed herein. A procedure for the generation of transformed plants having or expressing ERSP, ICK motif protein and/or STA. A plant made by any of the products and processes described herein.

[0215] A protein comprised of an Endoplasmic Reticulum Signal Peptide (ERSP) operably linked to an Inhibitor Cystine Knot (ICK) motif protein operably linked to a Translational Stabilizing Protein (STA) operably linked to an Intervening Linker Peptide (LINKER) which is designated as ERSP-STA-LINKER-ICK, ERSP-ICK-LINKER-STA, ERSP-STA-L-ICK or ERSP-ICK-L-STA, wherein said ERSP is the N-terminal of said protein and said STA may be either on the N-terminal side (upstream) of the ICK motif protein of the C-terminal side (downstream) of the ICK motif protein and said LINKER is between STA and the ICK motif protein. A protein designated as ERSP-STA-LINKER-ICK or ERSP-ICK-LINKER-STA, comprising any of the ERSPs, ICK motif proteins, Intervening Linker Peptides and Translational Stabilizing Proteins described herein.

[0216] A nucleotide that codes for any of the peptides described as Endoplasmic Reticulum Signal Peptide (ERSP), Inhibitor Cystine knot (ICK) motif protein, Intervening Linker Peptide (LINKER) and/or Translational Stabilizing Protein (STA) and any and all nucleotides that code for any of these proteins that are used to create transgenic plants.

[0217] The use of any of the peptides or nucleotides that code for Endoplasmic Reticulum Signal Peptide (ERSP), Inhibitor Cystine knot (ICK) motif protein, Intervening Linker Peptide and/or Translational Stabilizing Protein (STA) to make or transform a plant or plant genome in order to express properly folded toxic peptides in a transformed plant. The use of any of the peptides or nucleotides that code for Endoplasmic Reticulum Signal Peptide (ERSP), Inhibitor Cystine knot (ICK) motif protein, Intervening Linker Peptide (LINKER) and/or Translational Stabilizing Protein (STA) to make or transform a plant or plant genome in order to express properly folded toxic peptides in the transformed plant and to cause the accumulation of the expressed and properly folded toxic peptides in said plant and to cause an increase the plant's resistance to insect damage.

[0218] A method of using the nucleotides or expression ORFs in an ICK expression vector that code for Endoplasmic Reticulum Signal Peptide (ERSP), Inhibitor Cystine knot (ICK) motif protein, Intervening Linker Peptide and/or Translational Stabilizing Protein (STA) to create transgenic plants. An expression ORF comprising any of the nucleotides in an ICK expression vector which express ERSP, ICK motif protein, LINKER and/or STA. A functional expression ORF in an ICK expression vector incorporated into a transformed plant, comprising nucleotides that code for that code for ERSP, ICK motif protein, LINKER and/or STA or that could be made by one skilled in the art given the teaching disclosed herein. A procedure for the generation of transformed plants having or expressing ERSP, ICK motif protein, LINKER and/or STA. A plant made by any of the products and processes described herein.

[0219] A protein comprised of an Endoplasmic Reticulum Signal Peptide (ERSP) operably linked to multiple Inhibitor Cystine knot (ICK) motif protein domain, which are operably linked by Intervening Linker Peptides (LINKER), operably linked to a Translational Stabilizing Protein (STA) operably linked to an Intervening Linker Peptide, which is designated as ERSP-STA-(LINKERᵢ-ICKⱼ)_{N} or ERSP-(ICKⱼ-LINKERᵢ)_{N}-STA and sometimes as ERSP-STA-(Lᵢ-ICKⱼ)_{N} or ERSP-(ICKⱼ-Lᵢ)_{N}-STA, wherein said ERSP is the N-terminal of said protein and said STA may be either on the N-terminal side (upstream) of the multiple ICK motif protein domain ((LINKERᵢ-ICKⱼ)_{N}) or the C-terminal side (downstream) of the multiple ICK motif protein domain ((ICKⱼ-LINKERᵢ)_{N}) and said multiple Intervening Peptides (LINKERᵢ) is between STA and the multiple ICK motif protein domain and between the ICK motif proteins in the multiple ICK motif protein domain. A protein designated as ERSP-STA-(LINKERᵢ-ICKⱼ)_{N} or ERSP-(ICKⱼ-LINKERᵢ)_{N}-STA, comprising any of the ERSPs, ICK motif proteins, Intervening Linker Peptides and Translational Stabilizing Proteins described herein.

[0220] A nucleotide that codes for any of the peptides described as Endoplasmic Reticulum Signal Peptide (ERSP), multiple Inhibitor Cystine knot (ICK) motif protein domain, Intervening Linker Peptide (LINKER) and/or Translational Stabilizing Protein (STA) and any and all nucleotides that code for any of these proteins that are used to create transgenic plants.

[0221] The use of any of the peptides or nucleotides that code for Endoplasmic Reticulum Signal Peptide (ERSP), multiple Inhibitor Cystine knot (ICK) motif protein domain, Intervening Linker Peptide, (LINKER) and/or Translational Stabilizing Protein (STA) to make or transform a plant or plant genome in order to express properly folded toxic peptides in a transformed plant. The use of any of the peptides or nucleotides that code for Endoplasmic Reticulum Signal Peptide (ERSP), multiple Inhibitor Cystine knot (ICK) motif protein domain, Intervening Linker Peptide (LINKER) and/or Translational Stabilizing Protein (STA) to make or transform a plant or plant genome in order to express properly folded toxic peptides in the transformed plant and to cause the accumulation of the expressed and properly folded toxic peptides in said plant and to cause an increase the plant's resistance to insect damage.

[0222] A method of using the nucleotides or expression ORFs that code for Endoplasmic Reticulum Signal Peptide (ERSP), multiple Inhibitor Cystine knot (ICK) motif protein domain, Intervening Linker Peptide (LINKER) and/or Translational Stabilizing Protein (STA) to create transgenic plants. An expression ORF comprising any of the nucleotides which express ERSP, multiple ICK motif protein domain, L or LINKER and/or STA. A functional expression ORF incorporated into a transformed plant, comprising nucleotides that code for ERSP, multiple ICK motif protein domain, LINKER and/or STA or that could be made by one skilled in the art given the teaching disclosed herein. A procedure for the generation of transformed plants having or expressing ERSP, multiple ICK motif protein domain, LINKER and/or STA. A plant made by any of the products and processes described herein.

[0223] A chimeric gene comprising a promoter active in plants operatively linked to the nucleic acids or expression ORF of the nucleotides described herein. A method of making, producing or using these chimeric genes that are described herein. A recombinant vector comprising the chimeric genes described herein. A method of making, producing or using the recombinant vectors described herein. A transgenic host cell comprising the chimeric genes described herein. A method of making, producing or using the transgenic host cell described herein. A transgenic host cell as described herein can be, e.g., a transgenic plant cell. A method of making, producing or using the transgenic plant cell described herein. A transgenic plant comprising the transgenic plant cell described herein. A method of making, producing or using the transgenic plants described herein. A transgenic plant as described herein which made from a corn, soybean, cotton, rice, wheat, sorghum, switchgrass, sugarcane, alfalfa, potatoes, tomatoes, tobacco, any of green leafy vegetables, or any of fruit trees. Seed from a transgenic plant as described herein wherein said seed comprises a chimeric gene as described herein. A method of making, producing or using the transgenic plant described herein. A method of making, producing or using the seeds described herein.

[0224] Plant expressed inhibitory cysteine knot (ICK) motif proteins from spiders and scorpions have been described (Khan et al, Transgenic Res., 2006, 15: 349-357; Hernandez-Campuzano et al, Toxicon. 2009 January; 53(1):122-8). We describe how to make plant expressed ICK motif proteins that are active and accumulate in plants to insecticidal dose levels. We show that prior descriptions of plant expressed ICK motif proteins were actually descriptions of inactive proteins that had lost their natural toxicity. We describe methods to increase the efficacy of the plant expression, to increase the accumulation of plant expressed proteins and to dramatically increase the insecticidal activity of plant expressed proteins. We describe how to induce the plant expressed ICK motif proteins to enter the Endoplasmic Reticulum (ER) directed by an Endoplasmic Reticulum Signaling Protein (ERSP) in plant cells, in order for the correct covalent cross-linking of peptide disulfide bridges which generate the essential tertiary ICK motif structure required for insecticidal activity. We further describe the plant expressed, ER-trafficking ICK motif protein complex with a translational stabilizing protein domain (STA) added in order to increase the size of the resulting ICK fusion protein which enhances peptide accumulation in the plant. We further describe the plant expressed, ER-trafficking ICK motif protein, with a translational stabilizing protein added as above, and with an intervening linker peptide (LINKER) added, the latter of which may allow for potential cleavage and the recovery of the active form of the ICK motif protein having insecticidal activity. We further describe the plant expressed polypeptide, which contains ER-trafficking ICK motif protein domain with multiple ICK motif proteins separated by intervening linker peptides (LINKER), with an intervening linker peptide added, with a translation stabilizing protein added, latter of which allows the correctly folded ICK motif protein to accumulate in the plant to the insecticidal dose.

[0225] This invention describes the ICK motif protein with insecticidal activity that are plant expressed and which can successfully protect a plant or crop from insect damage. The ICK motif protein expression ORF described herein is a nucleotide which will enable the plant translated peptides to not only be expressed in a plant but also to be expressed and folded properly, and to be accumulated to the insecticidal dose in the plant. An example of a protein expression ORF can be an ICK motif protein expression ORF which is can be described below in equation style and is shown in diagram style in the drawings or figures.
[0226] ersp-sta-(linkerᵢ-cripⱼ)_{N}, or ersp-(cripⱼ-linkerᵢ)_{N}-sta

[0227] The expression above is merely one example, and similar expressions could be written for other types of CRIP expression ORFs, for example an ICK expression ORF, could be written as:
[0228] ersp-sta-(linkerᵢ-ickⱼ)_{N}, or ersp-(ickⱼ-linkerᵢ)_{N}-sta

[0229] These expressions, equations or linear diagrams describe a polynucleotide open reading frame (ORF) for one type of CRIP, one which expresses the ICK motif protein complex, which can be described as ERSP-STA-(LINKER_{I}-ICK_{J})_{N} or ERSP-(ICK_{J}-LINKER_{I})_{N}-STA, or as ERSP-STA-(L_{I}-ICK_{J})_{N} or ERSP-(ICK_{J}-L_{I})_{N}-STA, containing four possible peptide components with dash signs to separate each component. In the diagrams above, the nucleotide component of ersp is a polynucleotide segment encoding a plant endoplasmic reticulum trafficking signal peptide (ERSP). The component of sta is a polynucleotide segment encoding a translation stabilizing protein (STA), which helps the accumulation of the ICK motif protein expressed in plants but may not be necessary in the ICK motif protein expression ORF. The component of linkerᵢ is a polynucleotide segment encoding an intervening linker peptide (L OR LINKER) to separate the ICK motif proteins from each other and from the translation stabilizing protein, and the subscription “i” indicates that different types of linker peptides can be used in the CRIP or ICK motif protein expression ORF. In the case that sta is not used in the ICK motif protein expression ORF, ersp can directly be linked to the polynucleotide encoding an ICK motif protein without a linker. The component of ickᵢ is a polynucleotide segment encoding an ICK motif protein (ICK), and the subscription “j” indicates different ICK motif proteins; (linkerᵢ-ickⱼ)_{N}” indicates that the structure of the nucleotide encoding an intervening linker peptide and an ICK motif protein can be repeated “N” times in the same open reading frame in the same ICK motif protein expression ORF, where N can be any integrate number from 1 to 10. N can be from 1 to 10, specifically N can be 1, 2, 3, 4, or 5, and in some embodiments N is 6, 7, 8, 9 or 10. The repeats may contain polynucleotide segments encoding different intervening linkers (LINKER) and different ICK motif proteins. The different polynucleotide segments including the repeats within the same ICK motif protein expression ORF are all within the same translation frame.

[0230] Any combination of the four principal components, ersp, sta, linker and crip or ick as in the diagram of the ICK motif protein expression ORF, may be used to create a PEP type ICK motif protein expression ORF as long as a minimum of ersp and at least one copy of crip or ick are used.

[0231] I. The ERSP or ersp Component of the PEPs.

[0232] The ICK motif protein expression ORF starts with an ersp at its 5′ terminus. For the ICK motif protein to be properly folded and functional when it is expressed from a transgenic plant, it must have an ersp nucleotide fused in frame with the polynucleotide encoding an ICK motif protein. During cellular translation process, translated ERSP can direct the ICK motif protein being translated to insert into the Endoplasmic Reticulum (ER) of the plant cell by binding with a cellular component called a signal-recognition particle. Within the ER the ERSP peptide is cleaved by signal peptidase and the ICK motif protein is released into the ER, where the ICK motif protein is properly folded during the post-translation modification process, for example, the formation of disulfide bonds. Without any additional retention protein signals, the protein is transported through the ER to the Golgi apparatus, where it is finally secreted outside the plasma membrane and into the apoplastic space. ICK motif protein can accumulate at apoplastic space efficiently to reach the insecticidal dose in plants. FIG. 1 shows a representative diagram of a simple two component peptide or nucleotide composed of an ERSP functionally linked to an ICK motif. The ICK could be a suitable CRIP. More complex proteins and polynucleotides utilizing ERSP are diagrammed in FIGS. 2-5 and these figures are further discussed in the discussion of the STA or Translational Stabilizing Protein.

[0233] The ERSP peptide is at the N-terminal region of the plant translated ICK motif protein complex and the ERSP portion is composed of about 3 to 60 amino acids. In some embodiments it is 5 to 50 amino acids. In some embodiments it is 10 to 40 amino acids but most often is composed of 15 to 20; 20 to 25; or 25 to 30 amino acids. The ERSP is a signal peptide so called because it directs the transportation of a protein. Signal peptides may also be called targeting signals, signal sequences, transit peptides, or localization signals. The signal peptides for ER trafficking are often 15 to 30 amino acid residues in length and have a tripartite organization, comprised of a core of hydrophobic residues flanked by a positively charged aminoterminal and a polar, but uncharged carboxyterminal region. (Zimmermann, et al, “Protein translocation across the ER membrane”, Biochimica et Biohysica Acta, 2011, 1808: 912-924).

[0234] Many ERSPs are known. Many plant ERSPs are known. It is NOT required that the ERSP be derived from a plant ERSP, non-plant ERSPs will work with the procedures described herein. Many plant ERSPs are however well known and we describe some plant derived ERSPs here. BAAS, for example, is derived from the plant, Hordeum vulgare, and has the amino acid sequence as follows:

(SEQ ID NO: 4)
MANKHLSLSLFLVLLGLSASLASG

[0235] Plant ERSPs, which are selected from the genomic sequence for proteins that are known to be expressed and released into the apoplastic space of plants, and a few examples are BAAS, carrot extensin, tobacco PR1. The following references provide further descriptions, and are incorporated by reference herein in their entirety. De Loose, M. et al. “The extensin signal peptide allows secretion of a heterologous protein from protoplasts” Gene, 99 (1991) 95-100. De Loose, M. et al. described the structural analysis of an extensin-encoding gene from Nicotiana plumbaginifolia, the sequence of which contains a typical signal peptide for translocation of the protein to the endoplasmic reticulum. Chen, M. H. et al. “Signal peptide-dependent targeting of a rice alpha-amylase and cargo proteins to plastids and extracellular compartments of plant cells” Plant Physiology, 2004 July; 135(3): 1367-77. Epub 2004 Jul. 2. Chen, M. H. et al. studied the subcellular localization of α-amylases in plant cells by analyzing the expression of α-amylase, with and without its signal peptide, in transgenic tobacco. These references and others teach and disclose the signal peptide that can be used in the methods, procedures and peptide, protein and nucleotide complexes and constructs described herein.

[0236] II. The CRIP and ICK Motif Protein Component or crip and ick of the PEPs.

[0237] In our ICK motif protein expression ORF diagram, “ick” means a polynucleotide encoding an “ICK motif protein,” or “inhibitor cystine knot motif protein,” which is a 16 to 60 amino acid peptide with at least 6 half-cysteine core amino acids having three disulfide bridges, wherein the 3 disulfide bridges are covalent bonds and of the six half-cystine residues the covalent disulfide bonds are between the first and fourth, the second and fifth, and the third and sixth half-cystines, of the six core half-cystine amino acids starting from the N-terminal amino acid. The ICK motif protein also comprises a beta-hairpin secondary structure, normally composed of residues situated between the fourth and sixth core half-cysteines of the motif, the hairpin being stabilized by the structural crosslinking provided by the motif's three disulfide bonds. Note that additional cysteine/cysteine or half-cystine amino acids may be present within the inhibitor cysteine knot motif, as shown in FIG. 6. The CRIP or ICK motif can be repeated in order to increase toxic peptide accumulation in the plant. See FIG. 4 and FIG. 5. This ability to repeat the CRIP or ICK motif, from 1 to 10 times and sometimes up to 15, 20 or 25 times is also shown in the equation like diagram of a CRIP or ICK protein expression ORF described herein as ersp-sta-(linkerᵢ-ickⱼ)_{N}, or ersp-(ickⱼ-linkerᵢ)_{N}-sta where the number of repeating LINKER-ICK motifs is given by the subscript number N and N is commonly 1-10 but can go even higher in some plants.

[0238] A similar expression like ersp-sta-(linkerᵢ-ickⱼ)_{N}, or ersp-(ickⱼ-linkerᵢ)_{N}-sta could be written and would describe other CRIP peptides. In this section an example of one expression ORF is one used to increase peptide expression in plants and is best exemplified with an ICK protein. In the diagram above, a polynucleotide open reading frame (ORF) which expresses an ICK motif protein complex, which can be described as ERSP-STA-(LINKER_{I}-ICK_{J})_{N} or ERSP-(ICK_{J}-LINKER_{I})_{N}-STA, or as ERSP-STA-(L_{I}-ICK_{J})_{N} or ERSP-(ICK_{J}-L_{I})_{N}-STA, containing four possible peptide components with dash signs to separate the each component is used. An alternate method of showing this type of construct can be found in the figures. In the diagram and the figures, the nucleotide component of ersp is a polynucleotide segment encoding a plant endoplasmic reticulum trafficking signal peptide (ERSP). The component of sta is a polynucleotide segment encoding a translation stabilizing protein (STA), which helps the accumulation of the ICK motif protein expressed in plants but may not be necessary in the ICK motif protein expression ORF. The component of lᵢ is a polynucleotide segment encoding an intervening linker peptide (L OR LINKER) to separate the ICK motif proteins from each other and from the translation stabilizing protein, and the subscription “i” indicates that different types of linker peptides can be used in the ICK motif protein expression ORF. In the case that sta is not used in the ICK motif protein expression ORF, ersp can directly be linked to the polynucleotide encoding an ICK motif protein without a linker. The component of ickᵢ is a polynucleotide segment encoding an ICK motif protein (ICK), and the subscription “j” indicates different ICK motif proteins; (linkerᵢ-ickⱼ)_{N}” indicates that the structure of the nucleotide encoding an intervening linker peptide and an ICK motif protein can be repeated “N” times in the same open reading frame in the same ICK motif protein expression ORF, where N can be any integrate number from 1 to 10, but can go even higher to 15, 20 and 25, these repeats may contain polynucleotide segments encoding different intervening linkers and different ICK or CRIP motif proteins. The different polynucleotide segments including the repeats within the same ICK or CRIP motif protein expression ORF are all within the same translation frame.

[0239] This motif is common in peptides isolated from the venom of numerous species. Invertebrate species include spiders, scorpions, cone snail, sea anemone etc., other examples are numerous, even snake venom has been known to have peptides having the ICK motif. An example within spiders that we used is from a class of ACTX peptides from the Australian Blue Mountains Funnel-web Spider, but the procedures described herein are useful and may be applied to any protein with the ICK motif.

[0240] Examples of peptide toxins with the ICK motif can be found in the following references. The N-type calcium channel blocker ω-Conotoxin was reviewed by Lew, M. J. et al. “Structure-Function Relationships of ω-Conotoxin GVIA” Journal of Biological Chemistry, Vol. 272, No. 18, Issue of May 2, pp. 12014-12023, 1997. A summary of numerous arthropod toxic peptides from different spider and scorpion species was reviewed in, Quintero-Hernandez, V. et al. “Scorpion and Spider Venom Peptides: Gene Cloning and Peptide Expression” Toxicon, 58, pp. 644-663, 2011. The three-dimensional structure of Hanatoxin1 using NMR spectroscopy was identified as an inhibitor cysteine knot motif in Takahashi, H. et al. “Solution structure of hanatoxin1, a gating modifier of voltage-dependent K+ channels: common surface features of gating modifier toxins” Journal of Molecular Biology, Volume 297, Issue 3, 31 Mar. 2000, pp. 771-780. The isolation and identification of cDNA encoding a scorpion venom ICK toxin peptide, Opicalcine1, was published by Zhu, S. et al. “Evolutionary origin of inhibitor cystine knot peptides” FASEB J., 2003 Sep. 17, (12):1765-7, Epub 2003 Jul. 3. The sequence-specific assignment and the secondary structure identification of BgK, a K⁺ channel-blocking toxin from the sea anemone Bunodosoma granulifera, was disclosed by Dauplais, M. et al. “On the convergent evolution of animal toxins” Journal of Biological Chemistry. 1997 Feb. 14; 272(7): 4302-9. A review of the composition and pharmacology of spider venoms with emphasis on polypeptide toxin structure, mode of action, and molecular evolution showing cysteine bridges, cysteine knot formations and the “knotting-type” fold was published by Escoubas, P. et al. “Structure and pharmacology of spider venom neurotoxins” Biochimie, Vol. 82, Issues 9-10, 10 Sep. 2000, pp. 893-907. The purified peptide, iberiotoxin, an inhibitor of the Ca²⁺-activated K⁺ channel, from scorpion (Buthus tamulus) venom was disclosed in Galvez, A. et al. “Purification and characterization of a unique, potent, peptidyl probe for the high conductance calcium-activated potassium channel from venom of the scorpion Buthus tamulus” Journal of Biological Chemistry, 1990 Jul. 5; 265(19): 11083-90. The purified peptide, charybdotoxin, an inhibitor of the Ca²⁺-activated K⁺ channel, from the venom of the scorpion Leiurus quinquestriatus was disclosed in Gimenez-Gallego, G. et al. “Purification, sequence, and model structure of charybdotoxin, a potent selective inhibitor of calcium-activated potassium channels” Proc Natl Acad Sci, 1988 May; 85(10): 3329-3333. From these and other publications, one skilled in the art should be able to readily identify proteins and peptides having what we describe as the ICK motif, ICK motif protein or the “inhibitor cystine knot motif.”

[0241] The ICK motif protein can be any protein with the ICK motif and is between 16 and 60 amino acids in length, with at least 6 cysteine residues that create covalent cross-linking disulfide bonds in the proper order. See FIG. 6. Some ICK motif peptides have between 26-60 amino acids in length. Some ICK motif proteins are between 16-48 amino acids in length. Some ICK motif proteins are between 26-48 amino acids in length. Some ICK motif proteins are between 30-44 amino acids in length. ICK motif proteins with natural insecticidal activity are preferred but ICK motif proteins with other types of activity such as salt and frost resistance are known to those skilled in the art and are claimed herein. Examples of insecticidal ICK motif proteins include the ACTX peptides and genes, and including all of the peptides and their coding genes known as Magi6.

[0242] An example of a protein expression ORF could be an ICK motif protein expression ORF diagrammed below as:
[0243] ersp-sta-(linkerᵢ-ickⱼ)_{N}, or ersp-(ickⱼ-linkerᵢ)_{N}-sta

[0244] A similar expression could be written for other CRIP peptides. In this section this example of an expression ORF is one used to high peptide expression and is best exemplified with an ICK protein. The diagram above a polynucleotide open reading frame (ORF) which expresses an ICK motif protein complex, which can be described as ERSP-STA-(LINKER_{I}-ICK_{J})_{N} or ERSP-(ICK_{J}-LINKER_{I})_{N}-STA, or as ERSP-STA-(L_{I}-ICK_{J})_{N} or ERSP-(ICK_{J}-L_{I})_{N}-STA, containing four possible peptide components with dash signs to separate the each component, In this diagram, the nucleotide component of ersp is a polynucleotide segment encoding a plant endoplasmic reticulum trafficking signal peptide (ERSP). The component of sta is a polynucleotide segment encoding a translation stabilizing protein (STA), which helps the accumulation of the ICK motif protein expressed in plants but may not be necessary in the ICK motif protein expression ORF. The component of lᵢ is a polynucleotide segment encoding an intervening linker peptide (L OR LINKER) to separate the ICK motif proteins from each other and from the translation stabilizing protein, and the subscription “i” indicates that different types of linker peptides can be used in the ICK motif protein expression ORF. In the case that sta is not used in the ICK motif protein expression ORF, ersp can directly be linked to the polynucleotide encoding an ICK motif protein without a linker. The component of ickᵢ is a polynucleotide segment encoding an ICK motif protein (ICK), and the subscription “j” indicates different ICK motif proteins; (linkerᵢ-ickⱼ)_{N}” indicates that the structure of the nucleotide encoding an intervening linker peptide and an ICK motif protein can be repeated “N” times in the same open reading frame in the same ICK motif protein expression ORF, where N can be any integrate number from 1 to 10, and the repeats may contain polynucleotide segments encoding different intervening linkers and different ICK or CRIP motif proteins. The different polynucleotide segments including the repeats within the same ICK or CRIP motif protein expression ORF are all within the same translation frame.

[0245] Examples of insecticidal ICK motif proteins include the ACTX peptides and genes and include all of the peptides and their coding genes as described in the references provided above and herein. Specific examples of ICK motif proteins and peptides disclosed for purposes of providing examples and not intended to be limiting in any way, are the peptides and their homologies as described above, and in particular peptides and nucleotides which originate from the venoms of Australian Funnel-web spiders. The following documents are incorporated by reference in the United States in their entirety, are known to one skilled in the art, and have all been published. They disclose numerous ICK motif proteins which, their full peptide sequence, their full nucleotide sequence, are specifically disclosed and are incorporated by reference, and in addition the full disclosures are incorporated by reference including all of their sequence listings. See the following: U.S. Pat. No. 7,354,993 B2, issued Apr. 8, 2008, specifically the peptide and nucleotide sequences listed there as sequences 1-39, from U.S. Pat. No. 7,354,993 B2, and those named U-ACTX polypeptides, and these and other toxins that can form 2 to 4 intra-chain disulfide bridges, and variants thereof, and the peptides appearing on columns 4 to 9 and in FIG. 2 of U.S. Pat. No. 7,354,993 B2. Other specific sequences can be found in EP patent 1 812 464 B1, published and granted Aug. 10, 2008, see Bulletin 2008/41, specifically the peptide and nucleotide sequences listed in the sequence listing, and those the other toxins that can form 2 to 4 intra-chain disulfide bridges, and those sequences listed there as 1-39, and sequences named U-ACTX polypeptides, and variants thereof, and the peptides appearing in paragraphs 0023 to 0055, and appearing in FIG. 1 of EP patent 1 812 464 B1.

[0246] Described and incorporated by reference to the peptides identified herein are homologous variants of sequences mentioned, having homology to such sequences or referred to herein, which are also identified and claimed as suitable for making special according to the processes described herein, including all homologous sequences having at least any of the following percent identities to any of the sequences disclosed here or to any sequence incorporated by reference: 50%, 55%, 60%, 65%, 70%, 75%, 80%, 85%, 90%, 95%, 96%, 97%, 98%, or 99% or greater identity or 100% identity to any and all sequences identified in the patents noted above, and to any other sequence identified herein, including each and every sequence in the sequence listing of this application. When the term homologous or homology is used herein with a number such as 50% or greater, then what is meant is percent identity or percent similarity between the two peptides. When homologous or homology is used without a numeric percent then it refers to two peptide sequences that are closely related in the evolutionary or developmental aspect in that they share common physical and functional aspects, like topical toxicity and similar size (i.e., the homolog being within 100% greater length or 50% shorter length of the peptide specifically mentioned herein or identified by reference herein as above).

[0247] Described and incorporated by reference to the peptides identified herein are toxic peptides including the following: peptides and its variants found in, isolated from, or derived from spiders of the genus Atrax or Hadronyche, including the genus species, Hadronyche versuta, or the Blue Mountain funnel web spider, Atrax robustus, Atrax formidabilis, Atrax infensus, including toxins known as U-ACTX polypeptides, U-ACTX-Hv1a, rU-ACTX-Hv1a, rU-ACTX-Hv1b, or mutants or variants, especially peptides of any of these types and especially those less than about 200 amino acids but greater than about 10 amino acids, and especially peptides less than about 150 amino acids but greater than about 20 amino acids, especially peptides less than about 100 amino acids but greater than about 25 amino acids, especially peptides less than about 65 amino acids but greater than about 25 amino acids, especially peptides less than about 55 amino acids but greater than about 25 amino acids, especially peptides of about 37 or 39 or about 36 to 42 amino acids, especially peptides with less than about 55 amino acids but greater than about 25 amino acids, especially peptides with less than about 45 amino acids but greater than about 35 amino acids, especially peptides with less than about 115 amino acids but greater than about 75 amino acids, especially peptides with less than about 105 amino acids but greater than about 85 amino acids, especially peptides with less than about 100 amino acids but greater than about 90 amino acids, including peptide toxins of any of the lengths mentioned here that can form 2, 3 and or 4 or more intrachain disulfide bridges, including toxins that disrupt calcium channel currents, including toxins that disrupt potassium channel currents, especially toxins that disrupt insect calcium channels or Us thereof, especially toxins or variants thereof of any of these types, and any combination of any of the types of toxins described herein that have oral or topical insecticidal activity, can be made special by the processes described herein.

[0248] The U peptides from the Australian Funnel Web Spider, genus Atrax and Hadronyche are particularly suitable and work well when treated by the methods, procedures or processes described by this invention. Examples of such suitable peptides tested and with data are provided herein. The following species are also specifically known to carry toxic peptides suitable for plant expression as PIPs by the process of this invention. The following species are specifically named: Atrax formidabillis, Atrax infensus, Atrax robustus, Hadronyche infensa, Hadronyche versuta. Any toxic peptides derived from any of the genus listed above and/or genus species and homologous to the U peptide are suitable for plant expression as PIPs according to the process in this invention.

[0249] The Examples in this specification are not intended to, and should not be used to limit the invention, they are provided only to illustrate the invention.

[0250] As noted above, many peptides are suitable candidates as the subject of the process for the plant expression as PIP. The sequences noted above, below and in the sequence listing are especially suitable peptides that can be expressed in plants as PIP, and some of these have been expressed in plants as PIP according to this invention with the results shown in the examples below.

(SEQ ID NO: 5)
GSQYC VPVDQ PCSLN TQPCC DDATC TQERN ENGHT VYYCR A

[0251] Named “U+2-ACTX-Hv1a,” it has disulfide bridges at positions: 5-20, 12-25, 19-39. The molecular weight is 4564.85 Daltons. Another example of an ICK motif insecticidal protein:

(SEQ ID NO: 6)
QYCVP VDQPC SLNTQ PCCDD ATCTQ ERNEN GHTVYYCRA

[0252] Named “U-ACTX-Hv1a,” it has disulfide bridges at positions: 3-18, 10-23, 17-37. The molecular weight is 4426.84 Daltons.

[0253] Additional examples include many sequences in the sequence listing.

[0254] III. The Translational Stabilizing Protein Component, STA or sta.

[0255] One of the ICK motif protein expression ORFs, ERSP-ICK, is sufficient to express a properly folded ICK motif peptide in the transformed plant, but in order for effective protection of a plant from pest damage, the plant expressed ICK motif protein needs to be accumulated to the insecticidal level. With transformation of a properly constructed ICK motif protein expression ORF, a transgenic plant can express and accumulate greater amounts of the correctly folded ICK motif protein. When a plant accumulates greater amounts of properly folded toxic peptides it can more easily resist or kill the insects that attack and eat the plants. The translational stabilizing protein can be used to significantly increase the accumulation of the toxic peptide in the plant and thus the potency of the PIP, especially when the PIP has a translational stabilizing protein of its own. See various representations of how the STA may be used in expression ORFs in FIGS. 2-5, and in various linear diagrams or equation like expressions used below. The translational stabilizing protein can be a domain of another protein or it can comprise an entire protein sequence. The translational stabilizing protein is a protein with sufficient tertiary structure that it can accumulate in a cell without being targeted by the cellular process of protein degradation. The protein can be between 5 and 50aa (e.g. another ICK-motif protein), 50 to 250aa (GNA), 250 to 750aa (e.g. chitinase) and 750 to 1500aa (e.g. enhancin).

[0256] In addition to FIGS. 2-5 the following linear diagram below describes one of the examples of the ICK motif protein expression ORF that encodes a stabilizing protein fused with ICK motif protein:
[0257] ersp-sta-l-ick

[0258] The protein, or protein domain can contain proteins that have no useful characteristics other than translation stabilization, or they can have other useful traits in addition to translational stabilization. Useful traits can include: additional insecticidal activity, such as activity that is destructive to the peritrophic membrane, activity that is destructive to the gut wall, and/or activity that actively transports the ICK motif protein across the gut wall. One embodiment of the translational stabilizing protein can be a polymer of fusion proteins involving ICK motif proteins. A specific example of a translational stabilizing protein is provided here to illustrate the use of a translational stabilizing protein. The example is not intended to limit the disclosure or claims in any way. Useful translational stabilizing proteins are well known in the art, and any proteins of this type could be used as disclosed herein. Procedures for evaluating and testing production of peptides are both known in the art and described herein. One example of one translational stabilizing protein is SEQ ID NO: 7, one letter code, as follows:

(SEQ ID NO: 7)
ASKGE ELFTG VVPIL VELDG DVNGH KFSVS GEGEG DATYG
KLTLK FICTT GKLPV PWPTL VTTFS YGVQC FSRYP DHMKR
HDFFK SAMPE GYVQE RTISF KDDGN YKTRA EVKFE GDTLV
NRIEL KGIDF KEDGN ILGHK LEYNY NSHNV YITAD KQKNG
IKANF KIRHN IEDGS VQLAD HYQQN TPIGD GPVLL PDNHY
LSTQS ALSKD PNEKR DHMVL LEFVT AAGIT HGMDE LYK

[0259] Named “GFP.” The molecular weight is 26736.02 Daltons.

[0260] In some embodiments the STA can even be CRIP or ICK as shown in FIG. 5. In these embodiments there is no separate STA protein, the STA protein is the same as the CRIP or ICK used. It could be the identical ICK that is bound with the LINKER, or there could be different ICKs one type bound to the LINKER and the other type acting as the STA. These alternative arrangements are also discussed in the section on LINKERS.

[0261] Additional examples of translational stabilizing proteins can be found in the following references, incorporated by reference in their entirety: Kramer, K. J. et al. “Sequence of a cDNA and expression of the gene encoding epidermal and gut chitinases of Manduca sexta” Insect Biochemistry and Molecular Biology, Vol. 23, Issue 6, September 1993, pp. 691-701. Kramer, K. J. et al. isolated and sequenced a chitinase-encoding cDNA from the tobacco hornworm, Manduca sexta. Hashimoto, Y. et al. “Location and nucleotide sequence of the gene encoding the viral enhancing factor of the Trichoplusia ni granulosis virus” Journal of General Virology, (1991), 72, 2645-2651. Hashimoto, Y. et al. cloned the gene encoding the viral enhancing factor of a Trichoplusia ni granulosis virus and determined the complete nucleotide sequence. Van Damme, E. J. M. et al. “Biosynthesis, primary structure and molecular cloning of snowdrop (Galanthus nivalis L.) lectin” European Journal of Biochemistry, 202, 23-30 (1991). Van Damme, E. J. M. et al. isolated Poly(A)-rich RNA from ripening ovaries of snowdrop lectin (GNA), yielding a single 17-kDa lectin polypeptide upon translation in a wheat-germ cell-free system, called agglutin. These references and others teach and disclose translational stabilizing proteins that can be used in the methods, procedures and peptide, protein and nucleotide complexes and constructs described herein.

[0262] IV. The Intervening Linker Peptide Component, LINKER, Linker, L or if Polynucleotide: linker or l of the PEPs

[0263] The ICK motif protein expression ORF described in this invention also incorporates polynucleotide sequences encoding intervening linker peptides between the polynucleotide sequences encoding the ICK motif protein (ick) and the translational stabilizing protein (sta), or between polynucleotide sequences encoding multiple ICK motif proteins domain ((l-ick)_{N} or (ick-l)_{N}) if the expression ORF involves multiple ICK motif protein domain expression. The intervening linker peptides (LINKERS) separate the different parts of the expressed ICK motif protein complex and help proper folding of the different parts of the complex during the expression process. In the expressed ICK motif protein complex, different intervening linker peptides can be involved to separate different functional domains. Various representations of proteins with LINKERS are shown in (FIGS. 3-5.) The LINKER is attached to a CRIP such as an ICK and this bivalent group can be repeated up to 10 (N=1-10) and possibly even more than 10 times in order to facilitate the accumulation of properly folded insecticidal peptide in the plant that is to be protected.

[0264] The intervening linker peptide is usually between 1 and 30 amino acids in length. It is not necessary an essential component in the expressed ICK motif protein complex in plants. A cleavable linker peptide can be designed to the ICK motif protein expression ORF to release the properly folded ICK motif protein from the expressed ICK motif protein complex in the transformed plant to improve the protection the ICK motif protein to the plant from pest damage. One type of the intervening linker peptide is the plant cleavable linker peptide. This type of linker peptides can be completely removed from the expressed ICK motif protein expression complex during the post-translational expression process in the plant cells. Therefore the properly folded ICK motif protein linked by this type of intervening linker peptides can be released in the plant cells from the expressed ICK motif protein complex during the post-translational expression process. Here we show numerous examples of LINKERS.

[0265] Another type of the cleavable intervening linker peptide is not cleavable during the expression process in plants. However, it has a protease cleavage site specific to serine, threonine, cysteine, aspartate proteases or metalloproteases. The type of cleavable linker peptide can be digested by proteases found in the insect and lepidopteran gut environment and/or the insect hemolymph and lepidopteran hemolymph environment to release the ICK motif protein in the insect gut or hemolymph. Here we show numerous examples of LINKERS. These linkers are presented as examples only and should not be considered limiting the invention. Using the information taught by this disclosure it should be a matter of routine for one skilled in the art to make or find other examples of LINKERS that will be useful in this invention.

[0266] An example of a cleavable type of intervening linker that illustrates the invention is listed in SEQ ID NO: 1, but cleavable linkers are not limited to this example. SEQ ID NO: 1 (one letter code) is IGER and here we name it “IGER.” The molecular weight of this intervening linker or LINKER is 473.53 Daltons.

[0267] An intervening linker peptide (LINKER) can also be one without any type of protease cleavage site, i.e. an uncleavable intervening linker peptide. An example of this is the linker ETMFKHGL (SEQ ID NO: 3).

[0268] Other examples of intervening linker peptides can be found in the following references, which are incorporated by reference herein in their entirety: A plant expressed serine proteinase inhibitor precursor was found to contain five homogeneous protein inhibitors separated by six same linker peptides in Heath et al. “Characterization of the protease processing sites in a multidomain proteinase inhibitor precursor from Nicotiana alata” European Journal of Biochemistry, 1995; 230: 250-257. A comparison of the folding behavior of green fluorescent proteins through six different linkers is explored in Chang, H. C. et al. “De novo folding of GFP fusion proteins: high efficiency in eukaryotes but not in bacteria” Journal of Molecular Biology, 2005 Oct. 21; 353(2): 397-409. An isoform of the human GalNAc-Ts family, GalNAc-T2, was shown to retain its localization and functionality upon expression in N. benthamiana plants by Daskalova, S. M. et al. “Engineering of N. benthamiana L. plants for production of N-acetylgalactosamine-glycosylated proteins” BMC Biotechnology, 2010 Aug. 24; 10: 62. The ability of endogenous plastid proteins to travel through stromules was shown in Kwok, E. Y. et al. “GFP-labelled Rubisco and aspartate aminotransferase are present in plastid stromules and traffic between plastids” Journal of Experimental Botany, 2004 March; 55(397): 595-604. Epub 2004 Jan. 30. A report on the engineering of the surface of the tobacco mosaic virus (TMV), virion, with a mosquito decapeptide hormone, trypsin-modulating oostatic factor (TMOF) was made by Borovsky, D. et al. “Expression of Aedes trypsin-modulating oostatic factor on the virion of TMV: A potential larvicide” Proc Natl Acad Sci, 2006 Dec. 12; 103(50): 18963-18968. These references and others teach and disclose the intervening linkers that can be used in the methods, procedures and peptide, protein and nucleotide complexes and constructs described herein.

[0269] The ICK motif protein expression ORF described above can be cloned into any plant expression vector for the ICK motif protein expression in plant transiently or stably.

[0270] Transient Plant Expression Systems

[0271] Transient plant expression systems can be used to promptly optimize the structure of the ICK motif protein expression ORF for some specific ICK motif protein expression in plants, including the necessity of some components, codon optimization of some components, optimization of the order of each components, etc. A transient plant expression vector is often derived from a plant virus genome. Plant virus vectors provide advantages in quick and high level of foreign gene expression in plant due to the infection nature of plant viruses. The full length of the plant viral genome can be used as a vector, but often a viral component is deleted, for example the coat protein, and transgenic ORFs are subcloned in that place. The ICK motif protein expression ORF can be subcloned into such a site to create a viral vector. These viral vectors can be introduced into plant mechanically since they are infectious themselves, for example through plant wound, spray-on etc. They can also be transformed into plants by agroinfection by cloning the virus vector into the T-DNA of the crown gall bacterium, Agrobacterium tumefaciens, or the hairy root bacterium, Agrobacterium rhizogenes. The expression of the ICK motif protein in this vector is controlled by the replication of the RNA virus, and the virus translation to mRNA for replication is controlled by a strong viral promoter, for example, 35S promoter from Cauliflower mosaic virus. Viral vectors with ICK motif protein expression ORF are usually cloned into T-DNA region in a binary vector that can replicate itself in both E. coli strains and Agrobacterium strains. The transient transformation of a plant can be done by infiltration of the plant leaves with the Agrobacterium cells which contain the viral vector for ICK motif protein expression. In the transient transformed plant, it is common for the foreign protein expression to be ceased in a short period of time due to the post-transcriptional gene silencing (PTGS). Sometimes a PTGS suppressing protein gene is necessary to be co-transformed into the plant transiently with the same type of viral vector that drives the expression of with the ICK motif protein expression ORF. This improves and extends the expression of the ICK motif protein in the plant. The most commonly used PTGS suppressing protein is P19 protein discovered from tomato bushy stunt virus (TBSV).

[0272] A demonstration of transient plant expression can be found in FIG. 7.

[0273] FIG. 7 shows transiently expressed Plant Transgenic Protein. FIG. 7 reports the relative accumulation of the ICK proteins compared to the % TSP, as detected by ELISA. There are four variations of ICK expression ORFs in FIG. 7 that illustrate the necessity of the ERSP to get proper folding of the ICK and the STA to get accumulation of the protein. Bar A reports a FECT expression system expressing SEQ ID NO: 8 the omega peptide (ICK) without any fusions. Bar B reports a TRBO expression system expressing SEQ ID NO: 9 a BAAS ERSP fused to the omega peptide (ICK). Bar C reports a FECT expression system expressing SEQ ID NO: 10 a GFP (STA) fused to IGER (Linker) fused to Hybrid toxin (ICK). Bar D reports a FECT expression system expressing SEQ ID NO: 11 a BAAS (ERSP) fused to a GFP (STA) fused to IGER (Linker) fused to Hybrid toxin (ICK). The detection levels for Bar A and B show negligible protein detection. In Bar A this is likely due to no proper folding of the ICK which occurs in the ER and in Bar B this is likely due to proper folding but no accumulation due to the lack of a STA. There are detectable levels in Bars C and D. When the experiment for Bar C [(SEQ ID NO: 10) a GFP (STA) fused to IGER (Linker) fused to Hybrid toxin (ICK)] was performed there was a high level of GFP fluorescence detected (data not shown) indicating much of the TSP was the fusion protein, however, when the ELISA was performed only 0.01% of the TSP was detected, and this is likely due to the lack of proper folding which did not occur as this protein was not targeted to the ER where folding occurs. The antibodies used in ELISA only detect the tertiary structure of a properly folded protein. When the experiment for Bar D [SEQ ID NO: 11 a BAAS (ERSP) fused to a GFP (STA) fused to IGER (Linker) fused to Hybrid toxin (ICK)] was performed there was some GFP fluorescence detected and an accumulation 0.1% of the TSP the ICK peptide fused to GFP. When the data for Bars A, B, C and D is taken together it is apparent that an ERSP in the ICK expression ORF is required to get proper folding and to increase the accumulation of the peptide a STA is required.

[0274] We have demonstrated and documented GFP emission of the green fluorescence of GFP-Hybrid fusion protein constructs in tobacco leaves transiently transformed using different FECT vectors designed for targeted expression. We have succeeded in using pFECT-BGIH vector for APO (apoplast localization) accumulation; pFECT-GIH vector for CYTO (cytoplasm localization) accumulation; and pFECT-BGIH-ER vector for ER (endoplasm reticulum localization) accumulation. Data not shown.

[0275] We have demonstrated and documented GFP emission of the green fluorescence of GFP-Hybrid fusion protein constructs in tobacco leaves transiently transformed using different types of ERSP. We have succeeded in demonstrating expression with pFECT-BGIH vector; expression with pFECT-EGIH vector; and expression with pFECT-E*GIH vector. Data not shown.

[0276] We have measured levels of peptide accumulation and this is shown in FIGS. 8 and 9. FIG. 8 is a graph of iELISA detected % TSPs of tobacco transiently expressed GFP fused U-ACTX-Hv1a with different accumulation localization. APO: apoplast localization; CYTO: cytoplasm localization; ER: endoplasm reticulum localization. FIG. 9 is a graph of iELISA detected % TSPs of tobacco leaves transiently expressing GFP fused U-ACTX-Hv1a using the FECT expression vectors encoding translational fusions with three different ERSP sequences: BAAS signal peptide (BGIH), Extensin signal peptide (EGIH) and modified Extensin signal peptide (E*GIH).

[0277] Integration of Protein Expression ORF into Plant Genome Using Stable Plant Transformation Technology

[0278] The ICK motif protein expression ORF can also be integrated into plant genome using stable plant transformation technology, and therefore ICK motif proteins can be stably expressed in plants and protect the transformed plants from generation to generation. For the stable transformation of plants, the ICK motif protein expression vector can be circular or linear. A few critical components must be included in the vector DNA. The ICK motif protein expression ORF for stable plant transformation should be carefully designed for optimal expression in plants based on the study in the transient plant expression as described above. The expression of ICK motif protein is usually controlled by a promoter that promotes transcription in some of all cells of the transgenic plant. The promoter can be a strong plant viral promoter, for example, the constitutive 35S promoter from Cauliflower Mosaic Virus (CaMV); it also can be a strong plant promoter, for example, the hydroperoxide lyase promoter (pHPL) from Arabidopsis thaliana; the Glycine max polyubiquitin (Gmubi) promoter from soybean; the ubiquitin promoters from different plant species (rice, corn, potato, etc.), etc. A plant transcriptional terminator often occurs after the stop codon of the ORF to halt the RNA polymerase and transcription of the mRNA. To evaluate the ICK motif protein expression, a reporter gene can be included in the ICK motif protein expression vector, for example, beta-glucuronidase gene (GUS) for GUS straining assay, green fluorescent protein (GFP) gene for green fluorescence detection under UV light, etc. For selection of transformed plants, a selection marker gene is usually included in the ICK motif protein expression vector. The marker gene expression product can provide the transformed plant with resistance to specific antibiotics, for example, kanamycin, hygromycin, etc., or specific herbicide, for example, glyphosate etc. If agroinfection technology is adopted for plant transformation, T-DNA left border and right border sequences are also included in the ICK motif protein expression vector to transport the T-DNA portion into the plant. The constructed ICK motif protein expression vector can be transform into plant cells or tissues using many transformation technologies. Agroinfection is a very popular way to transform a plant using an Agrobacterium tumefaciens strain or an Agrobacterium rhizogenes strain. Particle bombardment (also called Gene Gun, or Biolistics) technology is also very commonly used for plant transformation. Other less commonly used transformation methods include tissue electroporation, silicon carbide whiskers, direct injection of DNA, etc. After transformation, the transformed plant cells or tissues placed on plant regeneration media to regenerate successfully transformed plant cells or tissues into transgenic plants. The evaluation of the integration and expression of the ICK motif protein expression ORF in the transformed plant can be performed as follows.

[0279] Evaluation of a Transformed Plant

[0280] Evaluation of a transformed plant can be done in DNA level, RNA level and protein level. A stably transformed plant can be evaluated at all of these levels and a transiently transformed plant is usually only evaluated at protein level. To ensure that the ICK expression motif protein expression ORF integrates into the genome of a stably transformed plant, the genomic DNA can be extracted from the stably transformed plant tissues for the PCR evaluation or the Southern blot application. The expression of the ICK motif protein in the stably transformed plant can be evaluated in RNA level, i.e. the total mRNA can be extracted from the transformed plant tissues and the northern blot technique and the RT-PCR technology can applied to evaluate the mRNA level of the ICK motif protein qualitatively or quantitatively. The expression of the ICK motif protein in the transformed plant can also be evaluated in protein level directly. There are many ways to evaluate the ICK motif protein expressed in a transformed plant. If a reporter gene is transformed into the plant along with the ICK motif protein expression ORF, the reporter gene assay can be performed to initially evaluate the expression of the transformed ICK motif protein expression ORF, for example, GUS straining assay for GUS reporter gene expression, green fluorescence detection assay for GFP reporter gene expression, luciferase assay for luciferase reporter gene expression, etc. Moreover, the total expressed protein can be extracted from the transformed plant tissues for the direct evaluation of the expression of the ICK motif protein in the transformed plants. The extracted total expressed protein sample can be used in Bradford assay to evaluate the total protein level in the sample. Analytical HPLC chromatography technology, Western blot technique, or iELISA assay can be adopted to qualitatively or quantitatively evaluate the ICK motif protein in the extracted total protein sample from the transformed plant tissues. The ICK motif protein expression can also be evaluated by using the extracted total protein sample from the transformed plant tissues in an insect bioassay. Finally, the transformed plant tissue or the whole transformed plant can be tested in insect bioassays to evaluate the ICK motif protein expression and its protection for the plant.

[0281] We provide a detailed description and summary of Part I as follows:

[0282] We describe a protein comprised of an Endoplasmic Reticulum Signal Peptide (ERSP) operably linked to a Cysteine Rich Insecticidal Protein (CRIP) such as an Inhibitor Cysteine Knot (ICK) motif protein wherein said ERSP is the N-terminal of said protein (ERSP-ICK). The ERSP is any signal peptide which directs the expressed CRIP to the endoplasmic reticulum of plant cells. The CRIP can be an Inhibitor Cysteine Knot (ICK) protein or a Non-ICK protein. The ERSP is a peptide between 5 to 50 amino acids in length, originating from a plant, that is operably linked to a Translational Stabilizing Protein (STA), wherein said ERSP is the N-terminal of said protein and an intervening STA sequence may be either on the N-terminal side of the CRIP, which is optionally an ICK motif protein (ERSP-STA-ICK); or Non-ICK motif protein (ERSP-STA-Non-ICK) or on the C-terminal side of the ICK or Non-ICK motif protein (ERSP-ICK-STA) or (ERSP-Non-ICK-STA). The ERSP is a peptide between 3 to 60 amino acids in length, or a peptide between 5 to 50 amino acids in length, or a peptide between 20 to 30 amino acids in length. It can originate from a plant, Barley Alpha-Amylase Signal peptide (BAAS) with a SEQ ID NO: 4. The ERSP can be a peptide that is tobacco extensin signal peptide with a SEQ ID NO: 18. The ERSP can be a modified tobacco extensin signal peptide with a SEQ ID NO: 19, or a Jun a 3 signal peptide from Juniperus ashei with a SEQ ID NO: 27.

[0283] We describe a CRIP example that is an ICK motif protein is between 16 and 60 amino acids in length, between 26 and 48 amino acids in length, between 30 and 44 amino acids in length, where it is selected from any of the peptides or sources of peptides with inhibitory cysteine knot motif, or a insecticidal peptide and where it is any of the peptides or sources of peptides including Atrax or Hadronyche, any of the peptides originating from Hadronyche versuta, an ACTX peptide. The ICK motif protein is any insecticidal peptide and fragments thereof including mature, pre, and pro peptide versions of said peptides and sequence numbers as well as any mutations, or deletion, or addition of peptide segments but still maintenance of inhibitory cysteine knot structure. The ICK motif protein can be U-ACTX-Hv1a with SEQ ID NO: 6, Omega-ACTX-Hv1a with SEQ ID NO: 24, Kappa-ACTX-Hv1c. An expression ORF comprising any of the nucleotides that code for those peptides. An expression ORF comprising any of the nucleotides that code for the peptides integrated into a transgenic plant genome. The use of any of the peptides or nucleotides described herein to make or transform a plant or plant genome in order to express properly folded insecticidal peptides in a transformed plant and or to make or transform a plant or plant genome in order to express properly folded insecticidal peptides in the transformed plant and to cause the accumulation of the expressed and properly folded insecticidal peptides in said plant and to cause an increase the plant's resistance to insect damage. We describe procedures to use nucleotides to create transgenic plants and transformed plants having or expressing any of the peptides described herein. We describe a transformed plant made by any of these products and processes.

[0284] We describe a protein comprised of an Endoplasmic Reticulum Signal Peptide (ERSP) operably linked to a CRIP which is optionally an Inhibitor Cysteine Knot (ICK) motif protein or Non-ICK protein operably linked to a Translational Stabilizing Protein (STA), wherein said ERSP is the N-terminal of said protein and an intervening Translational Stabilizing Protein sequence may be either on the N-terminal side of the ICK motif protein (ERSP-STA-ICK or optionally a (ERSP-Non-ICK-STA) or the C-terminal side of the ICK motif protein (ERSP-ICK-STA) or ERSP-STA-Non-ICK).

[0285] We describe such a STA with a molecular weight of 12 kD and above, where said STA can be many proteins, including an ICK motif protein with molecular weight of 12 kD and above, or multiple ICK motif proteins connected with linker peptides (L) with molecular weight of 12 kD and above, for example ERSP-ICK-(Lᵢ-ICKⱼ)_{N}, or ERSP-(ICKⱼ-Lᵢ)_{N}-ICK. We explain the linker peptides can be the same or different. We say that one STA is an green fluorescence protein (GFP) originating from jellyfish with SEQ ID NO: 13 and the STA can be a snowdrop lectin, Galanthus nivalis agglutinin (GNA), with SEQ ID NO: 28 and that STA can be a Juniperus ashei protein, Jun a 3, with SEQ ID NO: 26.

[0286] We describe a LINKER is any peptide with 4-20 amino acids in length. We describe a LINKER that is any peptide containing a protease recognition site. We describe a LINKER as any peptide containing a plant protease cleavage site. We describe a LINKER is a peptide containing an amino acid sequence of IGER (SEQ ID NO: 1), EEKKN (SEQ ID NO: 2) and (SEQ ID NO: 3). We describe a LINKER as any peptide which can be cleaved in the insect digestive system, or in the insect hemolymph. We describe a LINKERs wherein said LINKER is a peptide containing a trypsin cleavage site.

[0287] We describe a nucleotide that codes for any of the proteins described including expression ORFs comprising any of the nucleotides that code for the peptides, as well as expression ORF comprising any of the nucleotides that code for the peptides, integrated into a transgenic plant genome, as well as transformed into a plant or plant genome in order to express properly folded insecticidal peptides in a transformed plant, as well as transformed into a plant or plant genome in order to express properly folded insecticidal peptides in the transformed plant and to cause the accumulation of the expressed and properly folded insecticidal peptides in said plant and to cause an increase the plant's resistance to insect damage. We describe transgenic plants that result from these descriptions and transformed plants having or expressing any of the peptides described herein.

[0288] We explain and describe an expression ORF comprising any of the nucleotides that code for the peptides herein as well an expression ORF integrated into a transgenic plant genome, and one reason this is done is to make or transform a plant or plant genome in order to express properly folded insecticidal peptides in a transformed plant and one reason this is done is to have the transformed plant cause the accumulation of the expressed and properly folded insecticidal peptides in said plant and to cause an increase the plant's resistance to insect damage. We teach how to make the transgenic plants using these procedures and expressing the peptides herein and any other peptides that one skilled in the art would use given the teaching herein and using any of the products and processes described herein.

[0289] We teach how to make a protein comprised of an Endoplasmic Reticulum Signal Peptide (ERSP) operably linked to an Inhibitor Cysteine Knot (ICK) motif protein operably linked to translational stabilizing protein (STA), operably linked to an intervening linker peptide (L), wherein said ERSP is the N-terminal of said protein, and said LINKER is between STA and the ICK motif protein, and said translational stabilizing protein may be either on the N-terminal side (upstream) of the ICK motif protein or the C-terminal side (downstream) of the ICK motif protein, and described as ERSP-STA-L-ICK, or ERSP-ICK-L-STA. And we explain the aforementioned ERSP, CRIP and ICK, LINKER, STA can be any of the peptides as described herein and any other peptides that one skilled in the art would use given the teaching herein and using any of the products and processes described herein.

[0290] We teach how to make a protein comprised of an Endoplasmic Reticulum Signal Peptide (ERSP) operably linked to a multiple Inhibitor Cysteine Knot (ICK) motif protein domain in which ICK motif proteins are linked to each other via intervening linker peptides (L), operably linked to a translational stabilizing protein (STA), operably linked to an intervening linker peptide (L), wherein said ERSP is the N-terminal of said protein, and said LINKER is between STA and the multiple ICK motif proteins domain, and said STA may be either on the N-terminal side (upstream) of the multiple ICK motif protein domain or the C-terminal side (downstream) of the multiple ICK motif protein domain, and described as ERSP-STA-(Lᵢ-ICKⱼ)_{N}, or ERSP-(ICKⱼ-Lᵢ)_{N}-STA.

[0291] We teach how to make the nucleotides that code for these proteins, the expression ORFs, to make a and to integrated into a transgenic plant genome, the chimeric genes, recombinant vectors, transgenic host cells, transgenic plant cells, transgenic plants, transgenic plants of which are corn, soybean, cotton, rice, wheat, sorghum, switchgrass, sugarcane, alfalfa, potatoes, tomatoes, tobacco, any of green leafy vegetables, or any of fruit trees, or any plants and species as mentioned herein, and a seed from a transgenic plant according to these procedures where the seed comprises the chimeric gene.

### PART I. EXAMPLES

[0292] The Examples in this specification are not intended to, and should not be used to, limit the invention; they are provided only to illustrate the invention.

### Example 1

[0293] Expression Comparison Between Two Transient Plant Expression Systems.

[0294] The transient plant transformation technologies were adopted to promptly optimize the ICK motif protein expression ORF for plant expression. Agroinfection technology with a plant viral vector has been used here for the transient plant transformation due to its high efficiency, easiness and inexpensiveness. Two viral transient plant expression systems were evaluated here for the ICK motif protein expression in plants. One was a tobacco mosaic virus overexpression system (TRBO, Lindbo J A, Plant Physiology, 2007, V145: 1232-1240). The TRBO DNA vector has a T-DNA region for agroinfection, which contains a CaMV 35S promoter that drives expression of the tobacco mosaic virus RNA without the gene encoding the viral coating protein. The other viral transient plant expression system was the FECT expression system (Liu Z & Kearney C M, BMC Biotechnology, 2010, 10:88). The FECT vector also contains a T-DNA region for agroinfection, which contains a CaMV 35S promoter that drives the expression of the foxtail mosaic virus RNA without the genes encoding the viral coating protein and the triple gene block. Both expression systems use the “disarmed” virus genome, therefore viral plant to plant transmission can be effectively prevented. To efficiently express the introduced heterologous gene, the FECT expression system additionally needs to co-express P19, a RNA silencing suppressor protein from tomato bushy stunt virus, to prevent the post-transcriptional gene silencing (PTGS) of the introduced T-DNA. (The TRBO expression system does not need co-expression of P19). The two transient plant expression systems were tested and compared by transient expression of ICK motif protein in Tobacco (Nicotiana benthamiana) as described below.

[0295] The ICK motif protein expression ORF was designed to encode a series of translationally fused structural motifs that can be described as follows: N′-ERSP-Sta-L-ICK-C′. Here the ICK motif protein for expression is U-ACTX-Hv1a, which has the following amino acid sequence (N′ to C′, one letter code):

(SEQ ID NO: 12)
QYCVPVDQPCSLNTQPCCDDATCTQERNENGHTVYYCRA

[0296] The ERSP motif used here is the Barley Alpha-Amylase Signal peptide (BAAS), which comprises of 24 Amino acids as shown below (N′ to C′, one letter code):

(SEQ ID NO: 4)
MANKHLSLSLFLVLLGLSASLASG

[0297] The stabilizing protein (Sta) in this expression ORF was Green Fluorescent Protein (GFP), which has amino acid sequence as follows (N′ to C′, one letter code):

(SEQ ID NO: 13)
MASKGEELFTGVVPILVELDGDVNGHKFSVSGEGEGDATYGKLTLKFICT
TGKLPVPWPTLVTTFSYGVQCFSRYPDHMKRHDFFKSAMPEGYVQERTIS
FKDDGNYKTRAEVKFEGDTLVNRIELKGIDFKEDGNILGHKLEYNYNSHN
VYITADKQKNGIKANFKIRHNIEDGSVQLADHYQQNTPIGDGPVLLPDNH
YLSTQSALSKDPNEKRDHMVLLEFVTAAGITHGMDELYK

[0298] The linker peptide between GFP and U-ACTX-Hv1a contains the trypsin cleavage site and has an amino acid sequence as shown below (N′ to C′, one letter code):

(SEQ ID NO: 1)
IGER

[0299] According to the ICK motif expression ORF formula, this specific ICK expression ORF can be described as BAAS-GFP-IGER-Hybrid, or BGIH. The BGIH ORF was chemically synthesized by adding Pac I restriction site at its 5′ terminus and Avr II restriction site at its 3′ terminus. The sequence of the synthetic BGIH is below:

(SEQ ID NO: 14)
TTAATTAAATGGCTAATAAACACCTGAGTTTGTCACTATTCCTCGTGTTG
CTCGGGTTATCTGCTTCACTTGCAAGCGGAGCTAGCAAAGGAGAAGAACT
TTTCACTGGAGTTGTCCCAATTCTTGTTGAATTAGATGGTGATGTTAATG
GGCACAAATTTTCTGTCAGTGGAGAGGGTGAAGGTGATGCTACATACGGA
AAGCTTACCCTTAAATTTATTTGCACTACTGGAAAACTACCTGTTCCATG
GCCAACACTTGTCACTACTTTCTCTTATGGTGTTCAATGCTTTTCCCGTT
ATCCGGATCATATGAAACGGCATGACTTTTTCAAGAGTGCCATGCCCGAA
GGTTATGTACAGGAACGCACTATATCTTTCAAAGATGACGGGAACTACAA
GACGCGTGCTGAAGTCAAGTTTGAAGGTGATACCCTTGTTAATCGTATCG
AGTTAAAAGGTATTGATTTTAAAGAAGATGGAAACATTCTCGGACACAAA
CTCGAGTACAACTATAACTCACACAATGTATACATCACGGCAGACAAACA
AAAGAATGGAATCAAAGCTAACTTCAAAATTCGCCACAACATTGAAGATG
GATCCGTTCAACTAGCAGACCATTATCAACAAAATACTCCAATTGGCGAT
GGCCCTGTCCTTTTACCAGACAACCATTACCTGTCGACACAATCTGCCCT
TTCGAAAGATCCCAACGAAAAGCGTGACCACATGGTCCTTCTTGAGTTTG
TAACTGCTGCTGGGATTACACATGGCATGGATGAGCTCTACAAAATTGGT
GAAAGACAATATTGTGTTCCAGTTGATCAACCATGTTCTCTTAATACTCA
ACCATGTTGTGATGATGCTACTTGTACTCAAGAAAGAAATGAAAATGGAC
ATACTGTTTATTATTGTAGAGCTTAACCTAGG

[0300] The BGIH ORF was cloned into the Pac I and Avr II restriction sites of the FECT expression vector to create a BGIH expression vector for the FECT transient plant expression system (pFECT-BGIH). To maximize BGIH expression in the FECT expression system, a FECT vector expressing the RNA silencing suppressor protein P19 (pFECT-P19) was generated for co-transformation. To create a BGIH expression vector for TRBO transient plant expression system, a routine PCR procedure was performed to add a Not I restriction site to the 3′ terminus of the BGIH ORF described above. The new BGIH ORF was then cloned into Pac I and Not I restriction sites of the TRBO expression vector to create a BGIH expression vector for the TRBO transient plant expression system (pTRBO-BGIH).

[0301] An Agrobacterium tumefaciens strain, GV3101, was used for the transient expression of BGIH in tobacco leaves by the FECT and TRBO expression systems. To make competent GV3101 cells the following procedure was performed: an overnight culture of GV3101 was used to inoculate 200 mL Luria-Bertani (LB) medium. The cells were then allowed to grow to log phase with OD600 between 0.5 and 0.8. Then the cells were pelleted by centrifugation at 5000 rpm for 10 minutes at 4° C. The cells were then washed once with 10 mL prechilled TE buffer (Tris-HCl 10 mM, EDTA 1 mM, pH8.0), and then resuspended into 20 mL LB medium. The GV3101 cell resuspension was then aliquoted in 250 μL fractions into 1.5 mL microtubes. The aliquots were then snap-frozen in liquid nitrogen and stored at −80° C. freezer for future transformation.

[0302] The pFECT-BGIH and pTRBO-BGIH vectors were then transformed into the competent GV3101 cells using a freeze-thaw method as follows: the stored competent GV3101 cells were thawed on ice and then mixed with 1-5 μg pure DNA (pFECT-BGIH or pTRBO-BGIH vector). The cell-DNA mixture was then kept on ice for 5 minutes, then transferred to −80° C. for 5 minutes, and then incubated in a 37° C. water bath for 5 minutes. The freeze-thaw treated cells were then diluted into 1 mL LB medium and shaken on a rocking table for 2-4 hours at room temperature. A 200 μL aliquot of the cell-DNA mixture was then spread onto LB agar plates with the appropriate antibiotics (10 μg/mL rifampicin, 25 μg/mL gentamycin, and 50 μg/mL kanamycin were used for both pFECT-BGIH transformation and pTRBO-BGIH transformation) and incubated at 28° C. for two days. Resulting transformant colonies were then picked and culture in 6 mL aliquots of LB medium with the appropriate antibiotics for transformed DNA analysis and making glycerol stocks of the transformed GV3101 cells.

[0303] The transient transformation of tobacco leaves was performed using leaf injection with a 3 mL syringe without needle. The transformed GV3101 cells were streaked onto an LB plate with the appropriate antibiotics (as described above) and incubated at 28° C. for two days. A colony of transformed GV3101 cells was inoculated to 5 ml of LB-MESA medium (LB media supplemented with 10 mM MES, 20 μM acetosyringone) and the same antibiotics described above, and grown overnight at 28° C. The cells of the overnight culture were collected by centrifugation at 5000 rpm for 10 minutes and resuspended in the induction medium (10 mM MES, 10 mM MgCl2, 100 μM acetosyringone) at a final OD600 of 1.0. The cells were then incubated in the induction medium for 2 hour to overnight at room temperature and were then ready for transient transformation of tobacco leaves. The treated cells were infiltrated into the underside of attached leaves of Nicotiana benthamiana plants by injection, using a 3 mL syringe without a needle attached. For the FECT transient transformation, the pFECT-BGIH transformed GV3101 cells and pFECT-P19 transformed GV3101 cells were mixed together in equal amounts for infiltration of tobacco leaves by injection with a 3 mL syringe. For the TRBO transient transformation, only pTRBO-BGIH transformed GV3101 cells were infiltrated into tobacco leaves. The ICK motif protein expression in tobacco leaves was evaluated at 6-8 days post-infiltration.

[0304] The BGIH expression ORF contains a fusion protein of GFP (STA) and U-ACTX-Hv1a (ICK) with an IGER (SEQ ID NO: 1) linker peptide (LINKER) between them. As shown in FIG. 3, the green fluorescence of the expressed GFP portion of the transgenes was detected under U.V. light in tobacco leaves transformed with both the FECT and TRBO vectors. Interestingly, green fluorescence appeared evenly distributed in the FECT vector transformed tobacco leaves (with the exception of the vascular tissues), whereas green fluorescence in the TRBO vector transformed tobacco leaves appeared to accumulate in the vascular tissues which is due to TRBO retaining its viral movement protein and FECT not.

[0305] To quantitatively evaluate the ICK motif protein expression, the expressed proteins in the transformed tobacco leaves were extracted by following the procedure described here. 100 mg disks of transformed leaf tissue were collected by punching leaves with the large opening of a 1000 μL pipette tip. The collected leaf tissue was place into a 2 mL microtube with 5/32″ diameter stainless steel grinding balls, and frozen in −80° C. for 1 hour, and then homogenized using a Troemner-Talboys High Throughput Homogenizer. 750 μL ice-cold TSP-SE1 extraction solutions (sodium phosphate solution 50 mM, 1:100 diluted protease inhibitor cocktail, EDTA 1 mM, DIECA 10 mM, PVPP 8%, pH 7.0) was added into the tube and vortexed. The microtube was then left still at room temperature for 15 minutes and then centrifuged at 16,000 g for 15 minutes at 4° C. 100 μL of the resulting supernatant was taken and loaded into pre-Sephadex G-50-packed column in 0.45 μm Millipore MultiScreen filter microtiter plate with empty receiving Costar microtiter plate on bottom. The microtiter plates were then centrifuged at 800 g for 2 minutes at 4° C. The resulting filtrate solution, herein called total soluble protein extract (TSP extract) of the tobacco leaves, was ready for the quantitative analysis.

[0306] The total soluble protein concentration of the TSP extract was estimated using Pierce Coomassie Plus protein assay. BSA protein standards with known concentrations were used to generate a protein quantification standard curve. 2 μL of each TSP extract was mixed into 200 μL of the chromogenic reagent (CPPA reagent) of the Coomassie Plus protein assay kits and let react for 10 minutes. The chromogenic reaction was then evaluated by reading OD595 using a SpectroMax-M2 plate reader using SoftMax Pro as control software. The concentrations of total soluble proteins were 0.788±0.20 μg/μL and 0.533±0.03 μg/μL in the TSP extract from FECT-BGIH expression leaves and TRBO-BGIH expression leaves respectively. These results were used for the calculation of percentage of the expressed U-ACTX-Hv1a in the TSP (% TSP) in the iELISA assay.

[0307] Indirect ELISA (iELISA) assay was performed as follows to quantitatively evaluate the ICK motif protein in the tobacco leaves transiently transformed with the FECT and TRBO expression systems. 5 μL of the leaf TSP extract was diluted into 95 μL CB2 solution (Immunochemistry Technologies) in the well of an Immulon 2HD 96-well plate, with serial dilutions performed as necessary. Leaf proteins were from the extract samples were then allowed to coat the well walls for 3 hours in the dark at room temperature, and then the CB2 solution was removed, and each well was washed twice with 200 μL PBS (Gibco). 150 μL blocking solution (Block BSA in PBS with 5% non-fat dry milk) was then added into each well and incubated for 1 hour, in the dark, at room temperature. After the removal of the blocking solution and a PBS wash of the wells, 100 μL of rabbit anti-U-ACTX-Hv1a antibody (primary antibody) (1:250 dilution in blocking solution) was added to each well and incubated for 1 hour in the dark at room temperature. The primary antibody was then removed and each well was washed with PBS 4 times. Then 100 μL of HRP-conjugated goat anti-rabbit antibody (secondary antibody, used at 1:1000 dilution in the blocking solution) was added into each well and incubated for 1 hour in the dark at room temperature. After removal of the secondary antibody and wash of the wells with PBS, 100 μL substrate solution (a 1:1 mixture of ABTS peroxidase substrate solution A and solution B, KPL) was added to each well, and the chromogenic reaction was allowed to go until sufficient color development was apparent. Then 100 μL of peroxidase stop solution was added to each well to stop the reaction. The light absorbance of each reaction mixture in the plate was read at 405 nm using a SpectroMax-M2 plate reader, with SoftMax Pro used as control software. Serially diluted known concentrations of pure U-ACTX-Hv1a samples were treated in the same manner as described above in the iELISA assay to generate a mass-absorbance standard curve for quantities analysis. The expressed U-ACTX-Hv1a was detected by iELISA at 3.09±1.83 ng/μL in the leaf TSP extracts from the FECT-BGIH transformed tobacco; and 3.56±0.74 ng/μL in the leaf TSP extract from the TRBO-BGIH transformed tobacco. Or the expressed U-ACTX-Hv1a is 0.40% total soluble protein (% TSP) for FECT-BGIH transformants and 0.67% TSP in TRBO-BGIH transformants.

[0308] In conclusion, both FECT and TRBO transient plant expression systems can be used to express the ICK motif protein in plant. The ICK motif protein expression level in both systems is very close. However, the expression in the FECT system distributes evenly in the agroinfiltrated leaves, whereas the expression in the TRBO system accumulates in the vascular tissue of the agroinfiltrated leaves.

### Example 2

[0309] ICK Motif Protein Transient Expression in Tobacco Leaf with Accumulation at Different Subcellular Targets.

[0310] Plant expressed ICK motif protein needs to accumulate to a certain level in the plant to effectively protect the plant from insect damage. The accumulation level of the plant expressed ICK motif protein may be affected by its final localization in the plant cells. In this example, we investigated the effects of different subcellular localizations of the plant expressed ICK motif protein on the protein's accumulation level in the plant (using the FECT transient plant expression system). Three subcellular targets were investigated in this example, plant cell wall apoplast (APO), the endoplasmic reticulum (ER) and the cytoplasm (CYTO).

[0311] The APO targeted ICK motif protein expression ORF was designed to encode a series of translationally fused structural motifs that can be described as follows: N′-ERSP-Sta-L-ICK-C′. Again the ICK motif protein in this study was U-ACTX-Hv1a, and the BGIH expression ORF in the example 1 was used. The same vector as in the example 1, pFECT-BGIH, was used here.

[0312] The CYTO targeted ICK motif protein expression ORF was designed to encode a series of translationally fused structural motifs that can be described as follows: N′-STA-L-ICK-C′. In this study, the DNA sequence encoding the barley α-amylase signal peptide was removed from the BGIH expression ORF and became the GIH expression ORF, whose open reading frame sequence is below:

(SEQ ID NO: 15)
ATGGCTAGCAAAGGAGAAGAACTTTTCACTGGAGTTGTCCCAATTCTTGT
TGAATTAGATGGTGATGTTAATGGGCACAAATTTTCTGTCAGTGGAGAGG
GTGAAGGTGATGCTACATACGGAAAGCTTACCCTTAAATTTATTTGCACT
ACTGGAAAACTACCTGTTCCATGGCCAACACTTGTCACTACTTTCTCTTA
TGGTGTTCAATGCTTTTCCCGTTATCCGGATCATATGAAACGGCATGACT
TTTTCAAGAGTGCCATGCCCGAAGGTTATGTACAGGAACGCACTATATCT
TTCAAAGATGACGGGAACTACAAGACGCGTGCTGAAGTCAAGTTTGAAGG
TGATACCCTTGTTAATCGTATCGAGTTAAAAGGTATTGATTTTAAAGAAG
ATGGAAACATTCTCGGACACAAACTCGAGTACAACTATAACTCACACAAT
GTATACATCACGGCAGACAAACAAAAGAATGGAATCAAAGCTAACTTCAA
AATTCGCCACAACATTGAAGATGGATCCGTTCAACTAGCAGACCATTATC
AACAAAATACTCCAATTGGCGATGGCCCTGTCCTTTTACCAGACAACCAT
TACCTGTCGACACAATCTGCCCTTTCGAAAGATCCCAACGAAAAGCGTGA
CCACATGGTCCTTCTTGAGTTTGTAACTGCTGCTGGGATTACACATGGCA
TGGATGAGCTCTACAAAATTGGTGAAAGACAATATTGTGTTCCAGTTGAT
CAACCATGTTCTCTTAATACTCAACCATGTTGTGATGATGCTACTTGTAC
TCAAGAAAGAAATGAAAATGGACATACTGTTTATTATTGTAGAGCTTAA

[0313] The GIH expression ORF was cloned into the Pac I and Avr II restriction sites of the FECT expression vector to create a GIH expression vector for FECT transient plant expression system (pFECT-GIH) for the CYTO targeting expression of U-ACTX-Hv1a.

[0314] The ER targeted ICK motif protein expression ORF was designed by adding a DNA sequence encoding the ER targeting signal peptide at the C′ end of the BGIH expression ORF which was named as BGIH-ER expression ORF. The ER targeting signal peptide used here has the following amino acid sequence (one letter code for amino acid):

(SEQ ID NO: 16)
KDEL

[0315] The DNA sequence of the BGIH-ER expression ORF is as follows:

(SEQ ID NO: 17)
ATGGCTAATAAACACCTGAGTTTGTCACTATTCCTCGTGTTGCTCGGGTT
ATCTGCTTCACTTGCAAGCGGAGCTAGCAAAGGAGAAGAACTTTTCACTG
GAGTTGTCCCAATTCTTGTTGAATTAGATGGTGATGTTAATGGGCACAAA
TTTTCTGTCAGTGGAGAGGGTGAAGGTGATGCTACATACGGAAAGCTTAC
CCTTAAATTTATTTGCACTACTGGAAAACTACCTGTTCCATGGCCAACAC
TTGTCACTACTTTCTCTTATGGTGTTCAATGCTTTTCCCGTTATCCGGAT
CATATGAAACGGCATGACTTTTTCAAGAGTGCCATGCCCGAAGGTTATGT
ACAGGAACGCACTATATCTTTCAAAGATGACGGGAACTACAAGACGCGTG
CTGAAGTCAAGTTTGAAGGTGATACCCTTGTTAATCGTATCGAGTTAAAA
GGTATTGATTTTAAAGAAGATGGAAACATTCTCGGACACAAACTCGAGTA
CAACTATAACTCACACAATGTATACATCACGGCAGACAAACAAAAGAATG
GAATCAAAGCTAACTTCAAAATTCGCCACAACATTGAAGATGGATCCGTT
CAACTAGCAGACCATTATCAACAAAATACTCCAATTGGCGATGGCCCTGT
CCTTTTACCAGACAACCATTACCTGTCGACACAATCTGCCCTTTCGAAAG
ATCCCAACGAAAAGCGTGACCACATGGTCCTTCTTGAGTTTGTAACTGCT
GCTGGGATTACACATGGCATGGATGAGCTCTACAAAATTGGTGAAAGACA
ATATTGTGTTCCAGTTGATCAACCATGTTCTATTAATACTCAACCATGTT
GTGATGATGCTACTTGTACTCAAGAAAGAAATGAAAATGGACATACTGTT
TATTATTGTAGAGCTAAAGATGAGCTCTAA

[0316] The BGIH-ER expression ORF was cloned into the Pac I and Avr II restriction sites of the FECT expression vector to create a BGIH-ER expression vector for FECT transient plant expression system (pFECT-BGIH-ER), for ER-targeted expression of U-ACTX-Hv1a.

[0317] All three vectors, pFECT-BGIH, pFECT-GIH and pFECT-BGIH-ER, were transformed into the Agrobacterium strain, GV3101, and the resulting transformed GV3101 cells were used for transient transformation into the leaves of Nicotiana benthamiana using the methods described in Example 1. All of the three expression ORFs should transiently express a fusion protein, comprising GFP-fused U-ACTX-Hv1a with a trypsin cleavable linker between the two structural domains.

[0318] After 6 days of transient tobacco transformation, the expression of GFP-fused U-ACTX-Hv1a was examined initially by detection of green fluorescence under UV light. Green fluorescence was detected at various levels in all of the transformed tobacco leaves. The transformed leaves with CYTO targeted accumulation of GFP fused U-ACTX-Hv1a showed the strongest green fluorescence, and those leaves with APO or ER targeted fusion protein accumulation showed weaker green fluorescence. Thus, the results indicated that CYTO targeted expression may facilitate greater accumulation of transgenic GFP fused U-ACTX-Hv1a protein than the APO and ER targeted expression in tobacco leaves. In three replications of this experiment, the transformed tobacco leaves with CYTO targeted expression always showed green fluorescence similar to or stronger than that of the leaves with APO targeted expression, and the weakest green fluorescence was detected in the tobacco leaves transformed with the ER targeted constructs. These initial results indicated that CYTO targeted expression may accumulate as much or more transgenic fusion protein than APO targeted expression, and that ER targeted expression yielded the least accumulation.

[0319] Total soluble protein samples were extracted from tobacco leaves transformed with the different FECT vectors (protocol was described in detail in Example 1). Pierce Coomassie Plus protein assay was performed as in the description in Example 1 to determine the concentrations of the total soluble protein in the TSP extracts, yielding the following concentration estimates: 0.31±0.04 μg/μL, 0.31±0.03 μg/μL and 0.34±0.05 μg/μL for APO targeted, CYTO targeted and ER targeted expressions respectively (N=3).

[0320] The indirect ELISA protocol was then performed using the TSP extracts as described in Example 1 to quantitate the expression level of the U-ACTX-Hv1a protein as a percentage of total soluble protein (% TSP), yielding the following percentage estimates: 0.126±0.032%, 0.049±0.085% and 0.025±0.018% for APO targeted, CYTO targeted and ER targeted expressions respectively (N=3). FIG. 8 summarizes this quantification of expressed U-ACTX-Hv1a (as % TSP values) for the various transformed tobacco leaves described above. These results indicated that APO targeted transgene expression resulted in the greatest accumulation of correctly folded ICK motif protein expressed in the leaves.

[0321] Overall, although the tobacco leaves transformed to produce CYTO targeted, transgenic GFP fused U-ACTX-Hv1a presented the most potent green fluorescence signal, iELISA results detected the least U-ACTX-Hv1a peptide in these transgenic tobacco leaves, in fact, considerably less than what was detected for leaves transformed for ER targeted expression (which had weakest green fluorescence signal). In iELISA assays, the primary antibody (rabbit anti-U-ACTX-Hv1a antibody) can only bind on the correctly folded U-ACTX-Hv1a peptide.

### Example 3

[0322] Alternate Signal Peptides for Expression of ICK Motif Proteins in Plants.

[0323] Because ER signal peptide may play a role in the protein expression level, two other ERSPs were tested using the FECT expression system described in the prior examples. The two ERSP candidates were tobacco extensin signal peptide, abbreviated as “E” in this study (Memelink et al, the Plant Journal, 1993, V4: 1011-1022), and one of its variants abbreviated as “E*” (Pogue G P et al, Plant Biotechnology Journal, 2010, V8: 638-654). Their amino acid sequences are listed below (N′ to C′, one letter code, with non-identical residues in bold font):

Extensin signal peptide
(SEQ ID NO: 18)
(EMGKMASLFASLLVVLVSLSLASESSA
Extensin signal peptide variant (E*):
(SEQ ID NO: 19)
MGKMASLFATFLVVLVSLSLASESSA

[0324] A DNA sequence encoding E was designed for tobacco expression as follows:

(SEQ ID NO: 20)
ATGGGTAAGATGGCTTCTCTGTTTGCTTCTCTGCTGGTTGTTCTGGTTT
CTCTGTCTCTGGCTTCTGAATCTTCTGCT

[0325] The E DNA sequence was generated using oligo extension PCR with four synthetic DNA primers. Then, in order to add a Pac I restriction site at its 5′ terminus and add part of 5′ terminal DNA sequence of GFP at its 3′ terminus, a further PCR was performed using the E DNA sequence as a template, yielding a 117 bp DNA fragment. This fragment was then used as the forward PCR primer to amplify the DNA sequence encoding the GFP-IGER linker-U-ACTX-Hv1a ORF from the vector pFECT-BGIH (refer to Example 1 and Example 2), thus producing a U-ACTX-Hv1a expression ORF encoding (from N′ to C′ terminus) extensin signal peptide-GFP-IGER linker-U-ACTX-Hv1a, following one of our ICK motif protein expression ORF design as ERSP-Sta-L-ICK. This expression ORF, named “EGIH”, has a Pac I restriction site at its 5′ terminus and Avr II restriction site at the 3′ terminus. EGIH has the following DNA sequence:

(SEQ ID NO: 21)
TTAATTAAATGGGTAAGATGGCTTCTCTGTTTGCTTCTCTGCTGGTTGTT
CTGGTTTCTCTGTCTCTGGCTTCTGAATCTTCTGCTGCTAGCAAAGGAGA
AGAACTTTTCACTGGAGTTGTCCCAATTCTTGTTGAATTAGATGGTGATG
TTAATGGGCACAAATTTTCTGTCAGTGGAGAGGGTGAAGGTGATGCTACA
TACGGAAAGCTTACCCTTAAATTTATTTGCACTACTGGAAAACTACCTGT
TCCATGGCCAACACTTGTCACTACTTTCTCTTATGGTGTTCAATGCTTTT
CCCGTTATCCGGATCATATGAAACGGCATGACTTTTTCAAGAGTGCCATG
CCCGAAGGTTATGTACAGGAACGCACTATATCTTTCAAAGATGACGGGAA
CTACAAGACGCGTGCTGAAGTCAAGTTTGAAGGTGATACCCTTGTTAATC
GTATCGAGTTAAAAGGTATTGATTTTAAAGAAGATGGAAACATTCTCGGA
CACAAACTCGAGTACAACTATAACTCACACAATGTATACATCACGGCAGA
CAAACAAAAGAATGGAATCAAAGCTAACTTCAAAATTCGCCACAACATTG
AAGATGGATCCGTTCAACTAGCAGACCATTATCAACAAAATACTCCAATT
GGCGATGGCCCTGTCCTTTTACCAGACAACCATTACCTGTCGACACAATC
TGCCCTTTCGAAAGATCCCAACGAAAAGCGTGACCACATGGTCCTTCTTG
AGTTTGTAACTGCTGCTGGGATTACACATGGCATGGATGAGCTCTACAAA
ATTGGTGAAAGACAATATTGTGTTCCAGTTGATCAACCATGTTCTCTTAA
TACTCAACCATGTTGTGATGATGCTACTTGTACTCAAGAAAGAAATGAAA
ATGGACATACTGTTTATTATTGTAGAGCTTAACCTAGG

[0326] The EGIH DNA sequence was cloned into Pac I and Avr II restriction sites of the FECT vector to generate the pFECT-EGIH vector for transient plant expression of GFP fused U-ACTX-Hv1a protein.

[0327] A DNA sequence encoding the variant extensin signal peptide (E*) was designed for tobacco expression as follows:

(SEQ ID NO: 22)
ATGGGTAAGATGGCTTCTCTGTTTGCTACTTTTCTGGTTGTTCTGGTTTC
TCTGTCTCTGGCTTCTGAATCTTCTGCT

[0328] An “E*GIH” DNA sequence, which encoded a translational fusion of (listed from N′ to C′) variant extensin signal peptide-GFP-IGER linker-U-ACTX-Hv1a protein, was created using the same techniques as described above for the EGIH ORF. The resulting E*GIH ORF has the following DNA sequence:

(SEQ ID NO: 23)
TTAATTAAATGGGTAAGATGGCTTCTCTGTTTGCTACTTTTCTGGTTGTT
CTGGTTTCTCTGTCTCTGGCTTCTGAATCTTCTGCTGCTAGCAAAGGAGA
AGAACTTTTCACTGGAGTTGTCCCAATTCTTGTTGAATTAGATGGTGATG
TTAATGGGCACAAATTTTCTGTCAGTGGAGAGGGTGAAGGTGATGCTACA
TACGGAAAGCTTACCCTTAAATTTATTTGCACTACTGGAAAACTACCTGT
TCCATGGCCAACACTTGTCACTACTTTCTCTTATGGTGTTCAATGCTTTT
CCCGTTATCCGGATCATATGAAACGGCATGACTTTTTCAAGAGTGCCATG
CCCGAAGGTTATGTACAGGAACGCACTATATCTTTCAAAGATGACGGGAA
CTACAAGACGCGTGCTGAAGTCAAGTTTGAAGGTGATACCCTTGTTAATC
GTATCGAGTTAAAAGGTATTGATTTTAAAGAAGATGGAAACATTCTCGGA
CACAAACTCGAGTACAACTATAACTCACACAATGTATACATCACGGCAGA
CAAACAAAAGAATGGAATCAAAGCTAACTTCAAAATTCGCCACAACATTG
AAGATGGATCCGTTCAACTAGCAGACCATTATCAACAAAATACTCCAATT
GGCGATGGCCCTGTCCTTTTACCAGACAACCATTACCTGTCGACACAATC
TGCCCTTTCGAAAGATCCCAACGAAAAGCGTGACCACATGGTCCTTCTTG
AGTTTGTAACTGCTGCTGGGATTACACATGGCATGGATGAGCTCTACAAA
ATTGGTGAAAGACAATATTGTGTTCCAGTTGATCAACCATGTTCTCTTAA
TACTCAACCATGTTGTGATGATGCTACTTGTACTCAAGAAAGAAATGAAA
ATGGACATACTGTTTATTATTGTAGAGCTTAACCTAGG

[0329] The E*GIH DNA sequence was cloned into Pac I and Avr II restriction sites of the FECT vector to generate the pFECT-E*GIH vector for transient plant expression of GFP fused U-ACTX-Hv1a protein.

[0330] Three different FECT expression vectors, pFECT-BGIH, pFECT-EGIH and pFECT-E*GIH, were used to transiently express GFP fused U-ACTX-Hv1a protein in tobacco plants to evaluate how the protein expression level is affected by the different ERSPs. The three FECT expression vectors were transformed into Agrobacterium, GV3101, and then the transformed GV3101 was injected into tobacco leaves for transient expression of GFP fused U-ACTX-Hv1a protein in tobacco leaves using the techniques described in Example 1.

[0331] The expression levels of GFP fused U-ACTX-Hv1a from three different FECT expression vectors described above are first evaluated visually by detecting green fluorescence under UV light. Green fluorescence from the transiently transformed tobacco leaves from the three different FECT vectors is visible to the naked eye. All of the leaves showed similar levels of green fluorescence, suggesting that none of the three ERSPs tested contributed to a significant increase in the expression level of GFP fused U-ACTX-Hv1a protein.

[0332] Total soluble protein samples were extracted from the tobacco leaves transformed with the three ERSP FECT vectors as described above (protocol is described in detail in Example 1). Pierce Coomassie Plus protein assay was then performed (as described in Example 1) to determine the concentration of the total soluble protein in the resulting TSP samples, yielding values of 0.85±0.68 μg/μL, 0.70±0.47 μg/μL and 0.76±0.77 μg/μL for samples corresponding to the BGIH, EGIH and E*GIH expression ORFs respectively (N=4).

[0333] Indirect ELISA was then performed using the TSP extracts (as described in Example 1) to quantify the expression level of the U-ACTX-Hv1a protein as a percentage of the total soluble protein (% TSP), yielding values of 0.39±0.17% (N=3, as one data point was taken out as outliner), 0.48±0.26% (N=4), and 0.62±0.38% (N=4) for samples corresponding to the FECT vectors with BGIH, EGIH and E*GIH expression ORFs respectively. FIG. 9 summarizes the estimated U-ACTX-Hv1a levels as percentage in the total soluble protein (% TSP) for all of the samples taken from the tobacco leaves transformed with the three ERSP ORF described above. Although the data of % TSP from three FECT vector transformation looked different, they are not statistically different by Student's t-test. In other words, the three ERSPs did not make difference in the expression level of U-ACTX-Hv1a in the transiently transformed tobacco leaves.

### Example 4

[0334] Stabilizing Protein Expressed as Fusion Protein to the ICK Motif Protein Helps the Accumulation of ICK Motif Protein in Transformed Plants.

[0335] The ICK motif protein for plant expression in this example was omega-ACTX-Hv1a, originating from the Australian Blue Mountains Funnel Web Spider, Hadronyche versuta. Omega-ACTX-Hv1a has the following amino acid sequence (one letter code):

(SEQ ID NO: 24)
SPTCIPSGQPCPYNENCCSQSCTFKENENGNTVKRCD

[0336] The FECT expression system was used to express omega-ACTX-Hv1a in the tobacco plant, Nicotiana benthamiana. Two FECT vectors encoding different omega-ACTX-Hv1a expression ORFs were engineered. One of these expression ORFs encoded omega-ACTX-Hv1a with Barley Alpha-Amylase Signal peptide (BAAS) at its N′ terminus without any stabilizing protein. This expression ORF, referred to herein as “BO”, was subcloned to yield the FECT expression vector pFECT-BO. The other omega-ACTX-Hv1a expression ORF encodes a translational fusion of omega-ACTX-Hv1a to the protein Jun a 3 The mature Jun a 3 is a ˜30 kDa plant defending protein which is also an allergen for some people, is produced by Juniperus ashei trees and is used in this ORF as a translational stabilizing protein (STA.) Its amino acid sequence is listed below (one letter code):

(SEQ ID NO: 25)
MARVSELAFLLAATLAISLHMQEAGVVKFDIKNQCGYTVWAAGLPGGGKR
LDQGQTWTVNLAAGTASARFWGRTGCTFDASGKGSCQTGDCGGQLSCTVS
GAVPATLAEYTQSDQDYYDVSLVDGFNIPLAINPTNAQCTAPACKADINA
VCPSELKVDGGCNSACNVFKTDQYCCRNAYVDNCPATNYSKIFKNQCPQA
YSYAKDDTATFACASGTDYSIVFC

[0337] The mature Jun a 3 protein is provided below in SEQ ID NO: 26.

(SEQ ID NO: 26)
KFDIKNQCGYTVWAAGLPGGGKRLDQGQTWTVNLAAGTASARFWGRTGCT
FDASGKGSCQTGDCGGQLSCTVSGAVPATLAEYTQSDQDYYDVSLVDGFN
IPLAINPTNAQCTAPACKADINAVCPSELKVDGGCNSACNVFKTDQYCCR
NAYVDNCPATNYSKIFKNQCPQAYSYAKDDTATFACASGTDYSIVFC

[0338] The ERSP encoded in the ORF of SEQ ID NO: 25 is the Jun a 3 native signal peptide shown below as SEQ ID NO: 27.

(SEQ ID NO: 27)
MARVSELAFLLAATLAISLHMQEAGVV

[0339] The IGER linker, encoded by the sequence between the omega-ACTX-Hv1a domain and Jun a 3 domains that are encoded in the ORF, is described in detail in Example 1. Taken together, this omega-ACTX-Hv1a expression ORF is referred to as S-Juna3-IGER-Omega, or SJIO. Likewise, the FECT vector into which the SJIO expression ORF was inserted was named pFECT-SJIO.

[0340] The two omega-ACTX-Hv1a FECT expression vectors, pFECT-BO and pFECT-SJIO, were used to transiently express omega-ACTX-Hv1a protein in tobacco plants. The two FECT expression vectors were transformed into Agrobacterium strain GV3101, and the resulting GV3101 transformant was injected into tobacco leaves for transient expression of omega-ACTX-Hv1a in tobacco leaves using the techniques described in detail in Example 1.

[0341] At day 6 post-tobacco transformation, transformed tobacco leaves were collected and total soluble leaf proteins were extracted from the leaves (refer to Example 1 for detailed methods). Pierce Coomassie Plus protein assay was then performed to determine the concentrations of the total soluble leaf protein, yielding values of 3.047±0.176 μg/μL (N=2) and 2.473±0.209 μg/μL (N=2) for the leaves transformed with constructs encoding pFECT-SJIO and pFECT-BO respectively.

[0342] The indirect ELISA protocol was then performed using the TSP extracts above as described in Example 1 to quantitatively evaluate the expression level of the omega-ACTX-Hv1a protein as percentage of the total soluble protein (% TSP), yielding values of 0.133±0.014% (N=2) and 0.0004±0.0003% (N=2) for the leaves transformed with the pFECT-SJIO and pFECT-BO vectors respectively. These data indicated that omega-ACTX-Hv1a expressed as a translational fusion to Jun a 3 accumulated to a more than 300-fold higher steady state level than that of omega-ACTX-Hv1a expressed without translational fusion to the Jun a 3 protein.

[0343] The example 4 above, the function of the STA could also have been performed with snowdrop lectin (GNA) having the following sequence:

(SEQ ID NO: 28)
DNILYSGETLSTGEFLNYGSFVFIMQEDCNLVLYDVDKPIWATNTGGLSR
SCFLSMQTDGNLVVYNPSNKPIWASNTGGQNGNYVCILQKDRNVVIYGTD
RWATG

### Example 5

[0344] A cleavable linker between the stabilizing protein domain and the ICK motif protein domains in an ICK motif fusion protein expression ORF enhances the insecticidal activity of the resulting ICK motif protein expressed in a transgenic plant.

[0345] Because most chewing insects secrete trypsin into their guts to digest food, we designed a fusion protein expression ORF that encoded a trypsin cleavable linker between the stabilizing protein domain and the ICK motif protein domain of the fusion, in order to facilitate release of the ICK motif domain from the intact fusion protein in the insect gut.

[0346] The ICK motif protein for plant expression here was omega-ACTX-Hv1a, whose amino acid sequence is as follows (one letter code):

(SEQ ID NO: 24)
SPTCIPSGQPCPYNENCCSQSCTFKENENGNTVKRCD

[0347] The omega-ACTX-Hv1a expression ORF that was used encodes a fusion protein comprising the following domains (N′ to C′): Jun a 3 signal peptide::Jun a 3::IGER linker::omega-ACTX-Hv1a, as in the structural formula ERSP-Sta-L-ICK described above. The origin and sequence of Jun a 3 is as described above in Example 4.

[0348] The ERSP used here was the Jun a 3 native signal peptide, as described above in Example 4.

[0349] The IGER linker, encoded by the sequence between the omega-ACTX-Hv1a domain and Jun a 3 domains that are encoded in the ORF, is described in detail in Example 1. Taken together, this omega-ACTX-Hv1a expression ORF is referred to as S-Juna3-IGER-Omega, or SJIO. Likewise, the FECT vector into which the SJIO expression ORF was inserted was named pFECT-SJIO.

[0350] The vector, pFECT-SJIO, was then used to transiently express omega-ACTX-Hv1a protein in tobacco plants. The vector was transformed into Agrobacterium, GV3101, and then the transformed GV3101 was injected into tobacco leaves for transient expression of omega-ACTX-Hv1a in the leaves using the techniques described in detail in Example 1.

[0351] On day 6 post tobacco leaf transformation, 3.3 g of transformed tobacco leaf was collected and ground in liquid nitrogen. 50 mL of TSP-Sel buffer was used to extract the total soluble proteins (TSP) from the ground leaves by following the procedure described in Example 1. A total of 26 mL extract was recovered from the TSP extraction procedure, which was then evenly split into two samples, A and B, with 13 mL extract for each group. Sample A was treated with trypsin to release omega-ACTX-Hv1a from the fused Jun a 3 protein by adding 1.3 mL of 1 mg/mL trypsin in 1 mM HCl at 37° C. for 1 hour. Sample B was not treated by trypsin cleavage. To get omega-ACTX-Hv1a in the concentration range of bioactivity, both groups were concentrated in the same way as following. First, the extractions were loaded into a concentrator with 10 kD cutoff filter membrane and spun at 3200 g for 2 hours. Then 1.4 mL retentate from Sample A and 1.1 mL retentate from Sample B were saved for later tests. The 12.5 mL filtrate from Sample A and 12.5 mL filtrate from Sample B were further concentrated by being spun in concentrators with 1 kD cutoff filter membranes at 3200 g for 16 hours. 1.3 mL retentate was recovered from Sample A and 1.1 mL retentate was recovered from Sample B. Both 1 kD cutoff filtration retentates were saved for later tests. This sample concentration procedure was summarized in FIG. 10. The total TSP extraction from pFECT-SJIO transformed tobacco leaves was split evenly to two samples. One sample (A) was treated by trypsin cleavage and the other (B) was not. Both groups were concentrated by being spun in the concentrators with 10 kD and then 1 kD cutoff filter membranes, and the retentates from the 10 kD and 1 kD cutoff filtration were saved for further tests.

[0352] The SJIO expression ORF expressed a fusion protein as following, Jun a 3::IGER::Omega-ACTX-Hv1a, which comprises a total of 266 amino acid residues and has a predicted molecular weight of 28,204.28 Da. The trypsin cleavage of this fusion protein should release an omega-ACTX-Hv1a with molecular weight of 4049.2 Da and Jun a 3::IGER fusion protein with molecular weight of 24,155.1 Da. Therefore, if the trypsin cleavage reaction is complete in the treatment, then the anticipated major components of the filtration samples are as follows:

[0353] Sample A 10 kD filtration retentate: Jun a 3::IGER fusion.

[0354] Sample A 1 kD filtration retentate: Omega-ACTX-Hv1a.

[0355] Sample B 10 kD filtration retentate: Jun a 3::IGER::Omega-ACTX-Hv1a fusion.

[0356] Sample B 1 kD filtration retentate: no SJIO expressed protein.

[0357] To quantify the omega-ACTX-Hv1a peptide in the retentate samples, iELISA was performed as described in Example 1. The detected omega-ACTX-Hv1a concentrations in the samples were as follows:

[0358] Sample A 10 kD filtration retentate: 1.328 ng/μL of omega-ACTX-Hv1a, total 1.86 μg.

[0359] Sample A 1 kD filtration retentate: 2.768 ng/μL of omega-ACTX-Hv1a, total 3.60 μg.

[0360] Sample B 10 kD filtration retentate: 12.656 ng/μL of omega-ACTX-Hv1a, total 13.92 μg.

[0361] Sample B 1 kD filtration retentate: 0.752 ng/μL of omega-ACTX-Hv1a, total 0.83 μg.

[0362] As indicated, Omega-ACTX-Hv1a was detected in all filtration samples that were analyzed. The detected omega-ACTX-Hv1a in the Group A 10 kD filtration retentate is presumably due in large part to physical retention of the uncleaved fusion protein. Likewise the omega-ACTX-Hv1a detected in the Group B 1 kD filtration retentate sample could be due to a low rate of spurious filtration of the uncleaved fusion protein through the 10 kD cutoff filter membrane.

[0363] To confirm the trypsin-cleavage reaction was successful, reverse phase High Performance Liquid Chromatography (rpHPLC) was performed to analyze the components in the reserved filtration samples. HPLC was performed using a Varian E218 HPLC system with an Onyx 100 monolithic C₁₈ column (4.6×100 mm), using water with 0.1% trifluoroacetic acid (solvent A) and acetonitrile with 0.1% trifluoroacetic acid (solvent B) as mobile phase components. The omega-ACTX-Hv1a peptide was eluted from the column at a flow rate of 2 mL per minute using a linear gradient of 10-20% solvent B over 10 minutes. Samples of 99% pure synthetic omega-ACTX-Hv1a were used in rpHPLC to produce a standard curve (relating peak area to mass of peptide injected). FIG. 11 shows three separate elution profiles, 11A, 11B, 11C. As shown in FIG. 11A, the omega-ACTX-Hv1a peptide eluted at 6.5 minutes post-injection. When a 500 μL sample from Group B 1 kD filtration retentate was loaded into the HPLC system, there was no protein peak between 6 and 7 minutes post-injection in the corresponding HPLC chromatograph (FIG. 11B). When a 500 μL sample from Group A 1 kD filtration retentate was loaded into the HPLC system, there was a peak at retention time of 6.3 minute (see dotted line in FIG. 11) in the corresponding chromatograph, representing omega-ACTX-Hv1a released from the fusion protein by trypsin cleavage (FIG. 11C). The area of this peak corresponded to a concentration of omega-ACTX-Hv1a of between 16-70 ng/μL in the Sample A 1 kD filtration retentate (depending on the approach used to integrate the peak).

[0364] The reserved filtration samples were used to perform housefly injection bioassays to test the activity of the omega-ACTX-Hv1a in the fusion protein form and in the released form from the fusion protein. Housefly pupae (Musca domestica) were purchased from Benzon Research, Inc. and kept at 25° C. in a plastic box with air holes on the box lid and fly food (1:1 ratio sugar and powder milk) and cotton balls soaked in water in the box. On the day after adult housefly emergence, the flies were immobilized using a CO₂ line and then kept immobile using a CO₂ infusion pad. Flies weighing 12-18 mg were selected for the injection bioassay. To perform housefly injection, a microapplicator loaded with a 1 cc glass syringe with a 30 gauge needle, in which the injection solution was loaded, was used to deliver 0.5 μL doses into the dorsal thorax of the flies. The injected flies were then put into labeled boxes with air holes, and mortality was scored 24 hours post-injection. The following samples were injected into houseflies (groups of 10 flies were used for each sample):

[0365] Water injection as negative control.

[0366] Group A 10 kD filtration retentate.

[0367] Group A 1 kD filtration retentate.

[0368] Group B 10 kD filtration retentate.

[0369] Group B 1 kD filtration retentate.

[0370] 0.13 mg/mL trypsin solution as negative control.

[0371] At 24 hrs. post injection, the Sample A 10 kD filtration retentate and Sample A 1 kD filtration retentate caused 100% housefly mortality, while 0% mortality was observed for the flies injected with the other samples. Pure, native sequence omega-ACTX-Hv1a showed an LD₅₀ of 100 pmol/gram of housefly in this housefly injection bioassay; hence, to generate 100% mortality in this paradigm, the concentration of the injected omega-ACTX-Hv1a must at least 25 ng/μL. This is consistent with the bioassay results, since HPLC analysis of the Sample A 1 kD filtration retentate indicated a concentration of concentration of omega-ACTX-Hv1a of 16-70 ng/μL. Filtration samples that did not comprise material that was treated with trypsin cleavage did not generate mortality in the housefly injection bioassay, indicating that the Jun a 3 fused omega-ACTX-Hv1a was considerably less active than native-sequence omega-ACTX-Hv1a cleaved away from the fusion construct by trypsin. Therefore, the linker region of a plant ICK motif protein expression ORF can show enhanced insecticidal function when designed to be cleavable, such that the ICK motif domain of the ICK fusion protein can be released from the other structural domains of the protein by proteolysis.

### PART II. HIGH PRODUCTION PEPTIDES

[0372] The ability to successfully produce insecticidal peptides on a commercial scale, with reproducible peptide formation and folding, and with cost controls can be challenging. The wide variety, unique properties and special nature of peptides, combined with the huge variety of possible productions techniques can present an overwhelming number of approaches to peptide production.

[0373] There are few if any descriptions, however, that describe how to change a peptide so that it will be produced in a biological system at a much higher rate of production than the peptide is typically produced before it is changed. Here we present a way to change the composition of a peptide and in so doing increase the rate and amount and simultaneously lower the cost of peptide production. We describe novel ways of changing or “converting” one peptide into a different, more cost effective peptide, yet one which surprisingly is just as toxic as before it was converted.

[0374] We describe examples of these novel converted peptides, and we show how these methods for altering or converting a peptide can make a significant improvement in the yield of peptides without making significant changes in its activity. The new processes, new peptides, new formulations, and new organisms for producing those peptides are described and claimed herein. A process is described which increases the insecticidal peptide production yield from yeast expression systems by adding a dipeptide at the N terminus of insecticidal peptides. The addition of a dipeptide does not adversely affect the insecticidal activities of insecticidal peptides.

[0375] We describe examples of these novel converted peptides, and we show how these methods for altering or converting a peptide can make a significant improvement in the yield of peptides without making significant changes in its activity. The new processes, new peptides, new formulations, and new organisms for producing those peptides are described and claimed herein.

[0376] Detailed Procedures for Making High Production Peptides.

[0377] We describe a process and peptide that can increase peptide production. When followed these techniques will provide a converted peptide by adding a dipeptide at the N-terminus of the native peptide that has better production rate than the native peptide in three different ways. First, the over-all average yield of the dipeptide-native peptide strains is better than that of the native strains; second, the median yield of the dipeptide-native peptide strains is better than that of the native; and third, there are more dipeptide strains at the higher yield range than there are for native peptide strains. The process described here can be used in various in vivo systems, including plants, animals and microbes. The invention requires the addition of a dipeptide to the N-terminus of the native peptide, which is the peptide that was known before the dipeptide is added. The known peptide is then “converted,” and it can then be made with greater yields than were previously thought possible. In one embodiment insecticidal peptides are linked to a dipeptide. These dipeptide-native peptide systems can be used in plants that can produce the peptides. Plant produced peptides have a variety of uses from production to simply making a toxic peptide available for consumption by a damaging insect, thus either protecting the plants or possibly providing other benefits.

[0378] In one embodiment we describe a process for increasing insecticidal peptide production yield in yeast expression systems by the addition of any dipeptide to the N-terminus of the insecticidal peptide. The dipeptide is composed of a non-polar amino acid and a polar amino acid. The non-polar amino acid may be selected from glycine, alanine, proline, valine, leucine, isoleucine, phenylalanine and methionine. Glycine is the preferred non-polar amino acid. The polar amino acid may be selected from serine, threonine, cysteine, asparagine, glutamine, histidine, tryptophan and tyrosine. Serine is the preferred polar amino acid. The process and amino acids are described where the non-polar amino acid is at the N-terminus of the dipeptide and in one embodiment the preferred N-terminus of the dipeptide is glycine. The process and amino acids are described where the polar amino acid is at the C-terminus of the dipeptide and in one embodiment the preferred C-terminus of the dipeptide is serine.

[0379] In one embodiment of the invention the dipeptide is glycine-serine, gly-ser or GS. These amino acids are typically encoded by the following codons: Gly may be encoded by codons such as GGT, GGC, GGA, GGG and Ser may be encoded by codons such as TCT, TCC, TCA, TCG, AGT, and AGC.

[0380] The transgenes of the insecticidal peptides are designed such that their transgene sequences are optimized for the specific expression that may be needed. For example, the transgenes of insecticidal peptides may be optimized for expression in yeast, plants, bacteria, and viruses. Examples of such uses of the invention would include the engineering and optimization of transgenes for crops like maize and soybean, with the purpose of protecting them from insect pests. In one example we design transgenes of insecticidal peptides such that their transgene sequences are optimized for the specific expression in yeast expression systems, using for example, Kluyveromyces lactis, Pichia pastoris, and Saccharomyces cerevisiae. Other suitable yeast expression systems are known in the art. The nucleotide codons for a dipeptide, such as glycine-serine, (gly-ser) are added to the 5′ end of the transgene sequences of the mature insecticidal peptides. The transgene sequences are then ligated into appropriate expression vectors, which can provide appropriate selection markers, strong promoter-terminator sets for the specific yeast expression system, signal sequences for secretion, and cleavage sites between the respective signal sequences and mature peptide sequences. The insecticidal peptide expression vectors are then transformed into yeast cells, by means known to one skilled in the art, including either electroporation or chemical transformation methods, in order to generate stable peptide expression yeast strains. When these yeast strains grow in appropriate media, they produce insecticidal peptides modified by the addition of a dipeptide sequence, glycine-serine, to the N-terminus of the mature insecticidal peptides, which are secreted into the growth media. The addition of the dipeptide, glycine-serine, to the N-terminus of the mature insecticidal peptides, significantly improves the yield of the insecticidal peptides without adverse effects on the insecticidal activities of the peptides.

[0381] Our data shows that any Cysteine Rich Insecticidal Peptide (CRIP) can be made to grow at significantly higher yields than would otherwise be possible using the procedures we describe here. We have demonstrated the both ICK and non ICK types of CRIPs can have their yields dramatically improved using the High Production techniques we described. Here we provide evidence of dramatic and surprising increases in yields of two very diverse types of CRIPS.

[0382] The insecticidal peptides that can be converted may be selected from insecticidal venom, for example the venom of a spider. The spider may be an Australian funnel web spider. The peptides from the genus of Atrax or Hadronyche are U-ACTX-Hv1a and its analogs and are easily made special using the procedures described herein. Specific peptide examples from spiders are described in the sequence listing provided herein. These peptides and others can be converted using the procedures described herein.

[0383] The insecticidal peptides that can be converted may be selected from sea anemone toxins such as from Anemonia viridis as described in Example 3. Sea anemones are far removed in their normal habitat from the funnel web spiders of the genus of Atrax or Hadronyche and the venom from Anemonia viridis is not considered an ICK type of venom, as is venomous peptides from Atrax or Hadronyche but in spite of that the venom of the sea urchin, like the U-ACTX-Hv1a toxic peptides and other insecticidal venoms is that they are all a type of venom that we call Cysteine Rich Insecticidal Peptide or CRIP and identified here for the first time as such. The procedures described herein, in all the sections, are expected and believed to work with all of the peptide in the sequence listings and all of the peptides related to those sequences that would be understood by one skilled in the art to be a Cysteine Rich Insecticidal Peptide or CRIP. All such peptides and others can be converted using the procedures described herein.

[0384] In addition to the process, we also disclose novel High Production Peptides, herein “HP peptides,” comprising a dipeptide bound to one end of a peptide. In our embodiments the peptide is an insecticidal peptide. In one embodiment the dipeptide is added to the N-terminus of the peptide. We have demonstrated success in producing high yield strains with both ICK and non-ICK CRIP peptides. In a further embodiment the dipeptide is composed of a non-polar amino acid and a polar amino acid. In a further embodiment the non-polar amino acid is selected from glycine, alanine, proline, valine, leucine, isoleucine, phenylalanine and methionine, and the polar amino acid is selected from serine, threonine, cysteine, asparagine, glutamine histidine, tryptophan and tyrosine. In one specific embodiment an HP peptide is comprised of a peptide which is modified to have the dipeptide of glycine-serine as the first two amino acids of an otherwise unmodified, mature peptide. HP peptides may be produced by adding glycine-serine to the U peptide and its analogs to create HP peptides.

[0385] The modified peptides made by the processes described herein are new and are separately claimed. These peptides are described by all of their properties and not simply their sequence. These peptides are novel and have unique properties. Both HP peptides and the process of making them are disclosed and claimed herein.

[0386] Examples of useful peptides are well known and can be found in numerous references. One class of useful peptides is insecticidal peptides. Insecticidal peptides can be identified by their peptide nature and their activity, usually oral or injection insecticidal activity. Here we provide a few examples to better illustrate and describe the invention, but the invention is not limited to these examples. All of these examples and others not shown here are descriptive of new materials, described and claimed here for the first time.

[0387] HP (High Production) peptides are defined here as any peptides capable of being produced at greater than normal rates of production using the techniques described herein. Such peptides may have insecticidal activity. Typically, insecticidal peptides show activity when injected into insects but most do not have significant activity when applied to an insect topically. The insecticidal activity of HP peptides is measured in a variety of ways. Common methods of measurement are widely known to those skilled in the art. Such methods include, but are not limited to determination of median response doses (e.g., LD₅₀, PD₅₀, LC₅₀, ED₅₀) by fitting of dose-response plots based on scoring various parameters such as: paralysis, mortality, failure to gain weight, etc. Measurements can be made for cohorts of insects exposed to various doses of the insecticidal formulation in question. Analysis of the data can be made by creating curves defined by probit analysis and/or the Hill Equation, etc. In such cases, doses would be administered by hypodermic injection, by hyperbaric infusion, by presentation of the insecticidal formulation as part of a sample of food or bait, etc.

[0388] Specific examples of HP peptides disclosed for purposes of providing examples and not intended to be limiting in any way, are the U peptide and its homologies, which origin from the venoms of Australian Funnel-web spiders. The description of these peptides can be found in this document in earlier sections.

[0389] The Examples in this specification are not intended to, and should not be used to limit the invention, they are provided only to illustrate the invention.

[0390] As noted above, many peptides are suitable candidates as the subject of the process to make special. The sequences noted above, below and in the sequence listing are especially suitable peptides that can be made special, and some of these have been made special according to this invention with the results shown in the examples below:

(SEQ ID NO: 5)
GSQYC VPVDQ PCSLN TQPCC DDATC TQERN ENGHT VYYCR A
(one letter code)

[0391] Named “U+2-ACTX-Hv1a,” it has disulfide bridges at positions: 5-20, 12-25, 19-39. The molecular weight is 4564.85 Daltons.

(SEQ ID NO: 29)
GSRSC CPCYW GGCPW GQNCY PEGCS GPKV
(one letter code)

[0392] Named “Av3+2,” It has disulfide bridges at positions: 5-19, 6-13, 8-24. The molecular weight is 3076.47 Daltons.

[0393] Preparation of the HP Peptides

[0394] The HP peptides described herein can be prepared as below. The open reading frames (ORFs) of the insecticidal peptides are designed such that their nucleotide sequences are optimized for species-specific expression. Shown below is a specific example of a process for increasing insecticidal peptide production yield from yeast expression systems by addition of a dipeptide to the N-terminus of the insecticidal peptide. The dipeptide is composed of a non-polar amino acid and a polar amino acid. The non-polar amino acid may be selected from glycine, alanine, proline, valine, leucine, isoleucine, phenylalanine and methionine and glycine is the preferred non-polar amino acid. The polar amino acid may be selected from serine, threonine, cysteine, histidine, tryptophan, tyrosine, asparagine and glutamine and serine is the preferred polar amino acid. In the example below, the non-polar amino acid is at the N-terminus of the dipeptide and it is glycine. In the example below, the polar amino acid is at the C-terminus of the dipeptide and it is serine.

[0395] The insecticidal peptide ORF is designed for secretion from host yeast cells as follows: the ORF starts with a signal peptide sequence, followed by DNA sequence encoding a Kex 2 cleavage site (Lysine-Arginine), followed by the insecticidal peptide transgene with addition of glycine-serine codons at the 5′ terminus, and finally ends with a stop codon at the 3′ terminus. All these elements will be expressed to a fusion peptide in yeast cells as a single open reading frame. An α-mating factor signal sequence is most frequently used to facilitate metabolic processing of the recombinant insecticidal peptides through the endogenous secretion pathway of the recombinant yeast, i.e. the expressed fusion peptide will typically enter the Endoplasmic Reticulum, wherein the α-mating factor signal sequence is removed by signal peptidase activity, and then the resulting pro-insecticidal peptide will be trafficked to the Golgi Apparatus, in which the Lysine-Arginine dipeptide mentioned above is completely removed by Kex 2 endoprotease, after which the mature, HP insecticidal peptide, comprising the additional non-native glycine-serine dipeptide at its N-terminus, is secreted out of the cells.

[0396] To enhance insecticidal peptide expression level in the recombinant yeast cells, the codons of the insecticidal peptide ORF are usually optimized for expression in the specific host yeast species. Naturally occurring frequencies of codons observed in endogenous open reading frames of a given host organism are not necessarily optimized for high efficiency expression. Furthermore, different yeast species (for example, Kluyveromyces lactis, Pichia pastoris, Saccharomyces cerevisiae, etc.) have different optimal codons for high efficiency expression. Hence, codon optimization should be considered for the peptide ORF, including the sequence elements encoding the signal sequence, the Kex2 cleavage site and the insecticidal peptides, since they are initially translated as one fusion peptide in the recombinant yeast cells.

[0397] The codon-optimized peptide expression DNAs are then ligated into appropriate expression vectors for yeast expression. There are many expression vectors available for yeast expression, including episomal vectors and integrative vectors, and they are usually designed for specific yeast strains. One should carefully choose the appropriate expression vector in view of the specific yeast expression system which will be used for the peptide production. Here we used integrative vectors, which will integrate into chromosomes of the transformed yeast cells and be stable through cycles of cell division and proliferation.

[0398] The expression vectors usually contain some E. coli elements for DNA preparation in E. coli, for example, E. coli replication origin, antibiotic selection marker, etc. The vectors also contain an array of the sequence elements needed for expression of the transgene of interest, for example, transcriptional promoters, terminators, yeast selection markers, integrative DNA sequences homologous to host yeast DNA, etc. There are many suitable yeast promoters available, including natural and engineered promoters. In our efforts, yeast promoters such as pLAC4, pAOX1, pUPP, pADH1, pTEF, pGal1, etc. have been used. We also used the following commonly used yeast selection markers: acetamide prototrophy selection, zeocin-resistance selection, geneti cin-resi stance selection, nourseothricin-resi stance selection, uracil deficiency selection. Other markers known to one skilled in the art could also be used. The integrative DNA sequences are homologous to targeted genomic DNA loci in the transformed yeast species, and such integrative sequences include pLAC4, 25S rDNA, pAOX1, and TRP2, etc. The locations of insecticidal peptide transgenes can be adjacent to the integrative DNA sequence (Insertion vectors) or within the integrative DNA sequence (replacement vectors).

[0399] To get more copies of insecticidal peptide ORF integrated into the host yeast chromosomes, the expression vectors can be designed and generated to contain two or three copies of insecticidal peptide expression cassette. Each copy of the insecticidal peptide expression cassette in the expression vector should contain independent and complete expression structures including promoter, signal sequence, Kex2 cleavage sequence and, the insecticidal peptide transgene, stop codon transcription terminator.

[0400] The peptide expression vectors are then transformed into yeast cells. First, the expression vectors are usually linearized by specific restriction enzyme cleavage to facilitate chromosomal integration via homologous recombination. The linear expression vector is then transformed into yeast cells by a chemical or electroporation method of transformation and integrated into the targeted locus of the yeast genome by homologous recombination. The integration can happen at the same chromosomal locus multiple times; therefore the genome of a transformed yeast cell can contain multiple copies of insecticidal peptide transgenes. The successful transformants can be identified using growth conditions that favor a selective marker engineered into the expression vector and co-integrated into yeast chromosomes with the insecticidal peptide transgenes; examples of such markers include, but aren't limited to, acetamide prototrophy, zeocin resistance, geneticin resistance, nourseothricin resistance, and uracil prototrophy.

[0401] Due to the influence of unpredictable and variable factors-such as epigenetic modification of genes and networks of genes, and variation in the number of integration events that occur in individual cells in a population undergoing a transformation procedure-individual yeast transformants of a given transformation process will differ in their capacities to produce a transgenic insecticidal peptide. Therefore, yeast transformants carrying the insecticidal peptide transgenes should be screened for high yield strains. Two effective methods for such screening, each dependent on growth of small-scale cultures of the transformants to provide conditioned media samples for subsequent analysis, use reverse-phase HPLC or housefly injection procedures to analyze conditioned media samples from the transformants.

[0402] The transformant cultures are usually performed in 14 mL round bottom polypropylene culture tubes with 5-10 mL defined medium added to each tube, or in 48-well deep well culture plates with 1-2 mL defined medium added to each well. The Defined medium, not containing crude proteinaceous extracts or by-products such as yeast extract or peptone, is used for the cultures to reduce the protein background in the conditioned media harvested for the later screening steps. The cultures are performed at the optimal temperature, for example, 23.5° C. for K. lactis, for 5-6 days, until the maximum cell density is reached. The insecticidal peptides are now produced from the transformants and secreted out of cells to the growth medium. To prepare samples for the screening, cells are removed from the cultures by centrifugation and the supernatants are collected as the conditioned media, which are then cleaned by filtration through 0.22 μm filter membrane and then made ready for insecticidal peptide production strain screening, a couple of examples of such screening methods are described below.

[0403] One of the screening methods is reverse-phase HPLC (rpHPLC) screening of transformants. In this screening method, an HPLC analytic column with bonded phase of C18 is used. Acetonitrile and water are used as mobile phase solvents, and a UV absorbance detector set at 220 nm is used for the peptide detection. Appropriate amounts of the conditioned medium samples are loaded into the rpHPLC system and eluted with a linear gradient of mobile phase solvents. The corresponding peak area of the insecticidal peptide in the HPLC chromatograph is used to quantify the insecticidal peptide concentrations in the conditioned media. Known amounts of pure insecticidal peptide are run through the same rpHPLC column with the same HPLC protocol to confirm the retention time of the peptide and to produce a standard peptide HPLC curve for the quantification.

[0404] A second screening method is the housefly injection assay. Insecticidal peptide can kill houseflies when injected in measured doses through the body wall of the dorsal thorax. The efficacy of the insecticidal peptide can be defined by the median lethal dose of the peptide (LD50), which causes 50% mortality of the injected houseflies. The pure insecticidal peptide is normally used in the housefly injection assay to generate a standard dose-response curve, from which an LD50 value can be determined. Using an LD50 value from the analysis of a standard dose-response curve of the pure insecticidal peptide in question, quantification of the insecticidal peptide produced by a yeast transformant can be achieved using a housefly injection assay performed with serial dilutions of the corresponding conditioned media.

[0405] The insecticidal peptide production strain screen can identify the high yield yeast strains from hundreds of transformants. These strains can be fermented in bioreactor to achieve up to 6 g/L yield of the insecticidal peptides when using optimized fermentation media and fermentation conditions. The higher rates of production can be anywhere from 20 to 400, 20 to 100, 20 to 200, 20 to 300, 40 to 100, 40 to 200, 40 to 300, 40 to 400, 60 to 100, 60 to 200, 60 to 300, 60 to 400, 80 to 100, 80 to 200, 80 to 300, 80 to 400, 100 to 150, 100 to 200, 150 to 200, 200 to 250, 250 to 300, 250 to 350, 250 to 400, 300 to 350, 300 to 400% and 350 to 400 or any range of any value provided or even greater yields than can be achieved with a peptide before conversion, using the same or similar production methods that were used to produce the peptide before conversion.

[0406] Any of the sequences from the sequence listing, and as far as we know any CRIP could all be used to make high production peptides similar to either the ACTX motifs from the Australian Blue Mountain Funnel-web Spider we call the “U+2” peptide described below, or the Av3+2 peptide of the toxic sea anemone, Anemonia viridis, that we teach and describe in the examples below by using procedures taught here and the knowledge of one ordinarily skilled in the art. In addition, any other suitable CRIP peptide could be used in a like manner to produce a high production or plus 2, i.e. +2 peptide.

### PART II. EXAMPLES OF HIGH PRODUCTION PEPTIDES

[0407] The Examples in this specification are not intended to, and should not be used to limit the invention, they are provided only to illustrate the invention.

### Example 1

[0408] Expression of Native U and U+2-ACTX-Hv1a in Kluyveromyces lactis (K. lactis).

[0409] Insecticidal peptides to express:

[0410] U+2-ACTX-Hv1a:

(SEQ ID NO: 5)
GSQYCVPVDQPCSLNTQPCCDDATCTQERNENGHTVYYCRA

[0411] and

[0412] Native U-ACTX-Hv1a:

(SEQ ID NO: 6)
QYCVPVDQPCSLNTQPCCDDATCTQERNENGHTVYYCRA

[0413] To express the two insecticidal peptides above in K. lactis, the expression vector, pKLAC1, and the K. lactis strain, YCT306, were used, which are available from New England Biolabs, Ipswich, Mass., USA. pKLAC1 vector is an integrative expression vector. Once the U+2 and native U-ACTX-Hv1a transgenes were cloned into pKLAC1 and transformed into YCT306, their expression was controlled by the LAC4 promoter. The resulting transformants produced pre-propeptides comprising an α-mating factor signal peptide, a Kex2 cleavage site and mature insecticidal peptides. The α-Mating factor signal peptide guides the pre-propeptides to go through the endogenous secretion pathway and finally the mature insecticidal peptides are released into the growth media.

[0414] Codon optimization for U+2-ACTX-Hv1a expression was performed in two rounds. In the first round, based on some common features of high expression DNA sequences, 33 variants of the peptide ORF, expressing an α-Mating factor signal peptide, a Kex2 cleavage site and the U+2-ACTX-Hv1a peptide, were designed and their expression levels were evaluated in the YCT306 strain of K. lactis, resulting in an initial K. lactis expression algorithm. In the 2^{nd} round of optimization, five more variant U+2-ACTX-Hv1a peptide ORFs were designed based on the initial K. lactis expression algorithm to further fine-tune the K. lactis expression algorithm, and identified the best ORF for the U+2-ACTX-Hv1a peptide expression in K. lactis. This DNA sequence has an open reading frame encoding an α-mating factor signal peptide, a Kex2 cleavage site and a U+2-ACTX-Hv1a peptide. The optimized DNA sequence was cloned into the pKLAC1 vector using Hind III and Not I restriction sites, resulting in the U+2-ACTX-Hv1a expression vector, pLB10V5.

[0415] To enable integration of more copies of the optimized U+2-ACTX-Hv1a transgene into the K. lactis genome during transformation, generation of a U+2-ACTX-Hv1a expression vector containing two copies of U+2-ACTX-Hv1a expression cassette was processed as follows: A 3,306 bp intact U+2-ACTX-Hv1a expression cassette DNA sequence was synthesized, which comprised an intact LAC4 promoter element, a codon-optimized U+2-ACTX-Hv1a peptide ORF element and a pLAC4 terminator element. This intact expression cassette was then ligated into the pLB10V5 vector between Sal I and Kpn I restriction sites, downstream of the pLAC4 terminator of pLB10V5, resulting in the double transgene U+2-ACTX-Hv1a expression vector, pLB10V5D.

[0416] To generate a native U-ACTX-Hv1a expression vector, the pLB10V5 vector was mutagenized by deleting the glycine-serine codons at the 5′-terminus of the U+2-ACTX-Hv1a transgene region, using a Stratagene site-direct mutagenesis kit. This mutagenesis resulted in a new vector, pLB12, containing a single copy of the codon-optimized native U-ACTX-Hv1a expression cassette. To generate a double transgene native U-ACTX-Hv1a expression vector, a Stratagene site-direct mutagenesis kit was used again to remove the glycine-serine codons at the 5′-terminus of the U+2-ACTX-Hv1a transgene region in the 3,306 bp U+2-ACTX-Hv1a expression cassette transgene synthesized previously, followed by ligation to insert the mutagenized cassette into the pLB12 vector between Sal I and Kpn I restriction sites, resulting in the plasmid, pLB12D, an expression vector comprising two intact copies of the codon-optimized native U-ACTX-Hv1a expression cassette.

[0417] The double transgene vectors, pLB10V5D and pLB12D, were then linearized using Sac II restriction endonuclease and chemically transformed into YCT306 strain of K. lactis, according to instructions provided with a K. lactis Protein Expression Kit. The resulting transformants grew on YCB agar plate supplemented with 5 mM acetamide, which only the acetamidase-expressing transformants could use efficiently as a metabolic source of nitrogen.

[0418] For insecticidal peptide yield evaluations, 316 colonies were picked from the pLB10V5D transformants plates, and 40 colonies were picked from the pLB12D transformants plates. Inocula from the colonies were each cultured in 6 mL of the defined K. lactis media with 2% pure glycerol added as a carbon source. Cultures were incubated at 23.5° C., with shaking at 280 rpm, for six days, at which point cell densities in the cultures had reached their maximum levels as indicated by light absorbance at 600 nm (OD600). Cells were then removed from the cultures by centrifugation at 4,000 rpm for 10 minutes. The resulting supernatants (conditioned media) were filtered through 0.2 μm membranes for HPLC yield analysis.

[0419] For the peptide yield evaluation, the filtered conditioned media samples were analyzed on an Agilent 1100 HPLC system equipped with an Onyx monolithic 4.5×100 mm, C18 reverse-phase analytical HPLC column and an auto-injector. HPLC grade water and acetonitrile, both containing 0.1% trifluoroacetic acid, constituted the two mobile phase solvents used for the HPLC analyses. The peak areas of both the native U and U+2-ACTX-Hv1 were measured using HPLC chromatographs and then used to calculate the peptide concentration in the conditioned media, which were then further normalized to the corresponding final cell densities (as determined by OD600 measurements) as normalized peptide yield.

[0420] Housefly injection bioassay was used to evaluate the insecticidal activity of the peptides. The conditioned media were serially diluted to generate full dose-response curves from the housefly injection bioassay. Before injection, adult houseflies (Musca domestica) were immobilized with CO₂, and 12-18 mg houseflies were selected for injection. A microapplicator, loaded with a 1 cc syringe and 30-gauge needle, was used to inject 0.5 μL per fly doses of serially diluted conditioned media samples into houseflies through the body wall of the dorsal thorax. The injected houseflies were placed into closed containers with moist filter paper and breathing holes on the lids, and they were examined by mortality scoring at 24 hours post-injection.

[0421] Normalized yields were calculated. Peptide yield means the peptide concentration in the conditioned media in units of mg/L. But peptide yields are not always sufficient to accurately compare the strain production rate. Individual strains may have different growth rates, hence when a culture is harvested, different cultures may vary in cell density. A culture with a high cell density may produce a higher concentration of the peptide in the media, even though the peptide production rate of the strain is lower than another strain which has a higher production rate. So the term “normalized yield” is created by dividing the peptide yield with the cell density in the corresponding culture and this allows a better comparison of the peptide production rate between strains. The cell density is represented by the light absorbance at 600 nm with a unit of “A” (Absorbance unit).

[0422] Table 1, FIG. 12 and FIG. 13 summarize the U+2- and native U-ACTX-Hv1a normalized peptide yield distributions from the K. lactis strains. The overall averaged U+2-ACTX-Hv1a normalized peptide yield from the K. lactis strains was 4.06±3.05 mg/L·A, which was statistically significantly higher than the averaged native U-ACTX-Hv1a normalized peptide yield, 2.73±1.25 mg/L·A, by Student's t-test at 99% confidence level. The median normalized peptide yield of the U+2-ACTX-Hv1a K. lactis strains was 9.36 mg/L·A, which was almost three times higher than the median yield of native U-ACTX-Hv1a strains (3.35 mg/L·A). The U+2-ACTX-Hv1a peptide expression strains had much higher ratios of the strain counts at high yield level than the native U-ACTX-Hv1a strains. All of these results indicated that the addition of the glycine-serine dipeptide to the N-terminus of the U-ACTX-Hv1a peptide contributes to significant improvement of the predicted yield for yeast transformants expressing this peptide.

[0423] Table 1 shows a comparison of peptide yields from K. lactis strains.

TABLE 1
U + 2 and native U-ACTX-Hv1a Peptide Yield Comparison

| | | U + 2 Yield (total 316 strains) | | | | Native U Yield (total 40 strains) | | | |
|---|---|---|---|---|---|---|---|---|---|
| Normalized | | Strain | Ratio to | Overall | Median | Strain | Ratio to | Overall | Median |
| Yield Level | | count | total | average | Yield | count | total | average | Yield |
| >2 | mg/L · A | 242 | 0.765823 | 4.06 ± 3.05 | 9.36 | 26 | 0.65 | 2.73 ± 1.25 | 3.35 |
| >3 | mg/L · A | 161 | 0.509494 | (mg/L · A) | (mg/L · A) | 18 | 0.45 | (mg/L · A) | (mg/L · A) |
| >4 | mg/L · A | 124 | 0.392405 | | | 6 | 0.15 | | |
| >6 | mg/L · A | 62 | 0.196203 | | | 0 | 0 | | |
| >8 | mg/L · A | 29 | 0.0917722 | | | 0 | 0 | | |
| >10 | mg/L · A | 16 | 0.0506329 | | | 0 | 0 | | |
| >12 | mg/L · A | 9 | 0.028481 | | | 0 | 0 | | |
| >14 | mg/L · A | 6 | 0.0189873 | | | 0 | 0 | | |

[0424] FIG. 12 shows the histograms of the normalized peptide yield distributions for the U+2 and native U strains. The X scale shows the range of the normalized peptide yield. The Y scale on the left shows the frequency of the U+2 producing strains in the specific range of the normalized yield, and the Y scale on the right shows the frequency of the native U producing strains in the specific range of the normalized yield. The black bars represent the U+2 yield distribution and the grey bars represent the native U yield distribution. For example, the first black bar tells that about 0.03 (3%) of the total U+2 producing strains have normalized yields between 0 and 0.5 mg/L·A. The strain counts are different between native and +2 strains because 316 strains for U+2 were screened and 40 strains for the native peptide were screened.

[0425] FIG. 13 shows the distribution of the peptide yields from U+2 and native U-ACTX-Hv1a produced from the K. lactis strains. The U+2 data is shown in black and the native U data is in gray. The x-axis shows the yield in milligrams per liter and the y-scale shows the fraction of total U+2 or native U production from K. lactis strains. The yield from the U+2 strains, and the number of U+2 strains available that can produce high yields is far higher for the U+2 strains as compared to the native U strains.

[0426] Ordinarily one might expect making changes to a peptide sequence that dramatically improves its yield could affect its toxicity. Surprisingly that is not what happens with the dipeptides of this disclosure. Our data indicates the addition of the dipeptide, and especially the glycine-serine dipeptide, to the N-terminus of the U-ACTX-Hv1a peptide, does not lower the effectiveness of the insecticidal activities of the peptide. FIG. 14 shows two dose-response curves for housefly injection bioassays performed with the native and U+2-ACTX-Hv1a conditioned medium samples. The U+2-ACTX-Hv1a has a median lethal dose (LD50) of 76.8 pmol/g, which is consistent with the LD50 of native U-ACTX-Hv1a, 77.6 pmol/g.

### Example 2

[0427] Peptide Yields of Transformants of the Yeast, Pichia pastoris (P. pastoris), Expressing Either U+2-ACTX-Hv1a or U-ACTX-Hv1a were Studied.

[0428] Two P. pastoris vectors, pJUGαKR and pJUZαKR, were used for the U+2-ACTX-Hv1a or native U-ACTX-Hv1a peptide expression in P. pastoris. pJUGαKR and pJUZαKR are available from Biogrammatics, Carlsbad, Calif., USA. Both vectors are integrative vectors and use the uracil phosphoribosyltransferase promoter (pUPP) to enhance the heterologous transgene expression. The only difference between the vectors is that pJUGαKR provides G418 resistance to the host yeast, while pJUZαKR provides Zeocin resistance.

[0429] Pairs of complementary oligonucleotides, encoding the native U-ACTX-Hv1a and U+2-ACTX-Hv1a respectively, were designed and synthesized for sub cloning into the two yeast expression vectors. Hybridization reactions were performed by mixing the corresponding complementary oligonucleotides to a final concentration of 20 μM in 30 mM NaCl, 10 mM Tris-Cl (all final concentrations), pH 8, and then incubating at 95° C. for 20 min, followed by a 9 hour incubation starting at 92° C. and ending at 17° C., with 3° C. drops in temperature every 20 min. The hybridization reactions resulted in two DNA fragments encoding U+2-ACTX-Hv1a and native U-ACTX-Hv1a peptides respectively. The two P. pastoris vectors were digested with BsaI-HF restriction enzymes, and the double stranded products of the optimization reactions were then sub cloned into the linearized P. pastoris vectors using standard procedures. Following verification of the sequences of the four sub clones, plasmid aliquots were transformed by electroporation into the P. pastoris strain, Bg08. The resulting transformed yeast, selected based on resistance to Zeocin or G418 conferred by elements engineered into vectors pJUZαKR and pJUGαKR, respectively, were cultured and screened as described below. Since no transformant strains had more than one antibiotic resistance marker, and since transformation procedures were performed the same for yeast cells transformed with the U+2-ACTX-Hv1a transgene as for those transformed with the native U-ACTX-Hv1a transgene, it is reasonable to presume that the distributions of transgene copy number were comparable for the two populations of transformants being compared below.

[0430] Recipes for media and stocks used for the P. pastoris cultures are described as follows:

[0431] MSM media recipe

[0432] 2 g/L sodium citrate dihydrate

[0433] 1 g/L calcium sulfate dihydrate (0.79 g/L anhydrous calcium sulfate)

[0434] 42.9 g/L potassium phosphate monobasic

[0435] 5.17 g/L ammonium sulfate

[0436] 14.33 g/L potassium sulfate

[0437] 11.7 g/L magnesium sulfate heptahydrate

[0438] 2 mL/L PTM1 trace salt solution

[0439] 0.4 ppm biotin (from 500×, 200 ppm stock)

[0440] 1-2% pure glycerol or other carbon source

[0441] PTM1 trace salts solution:

[0442] Cupric sulfate-5H₂O 6.0 g

[0443] Sodium iodide 0.08 g

[0444] Manganese sulfate-H₂O 3.0 g

[0445] Sodium molybdate-2H₂O 0.2 g

[0446] Boric Acid 0.02 g

[0447] Cobalt chloride 0.5 g

[0448] Zinc chloride 20.0 g

[0449] Ferrous sulfate-7H₂O 65.0 g

[0450] Biotin 0.2 g

[0451] Sulfuric Acid 5.0 ml

[0452] Add Water to a final volume of 1 liter

[0453] 48-well Deep-well plates, sealed after inoculation with sterile, air-permeable tape, were used to culture the insecticidal peptide P. pastoris transformants. Colonies on the P. pastoris transformant plates were picked and inoculated the deep-well plates with 1 mL media per well, which was composed of MSM+0.2% PTM1+biotin (500× diluted from 200 ppm stock)+1% glycerol (pure). Inoculated plates were grown 5 days at 23.5° C. with 220 rpm shaking in a refrigerated incubator-shaker. 100 μL 5% glycerol were added to each well of the plates at 2, 3, and 4 days post inoculation. On day 5 post-inoculation, conditioned media was harvested by centrifugation at 3700 rpm for 15 minutes, followed by filtration using filter plate with 0.22 μM membrane. Filtered media stored at −20° C. for further analyses.

[0454] 0.3 mL aliquots of conditioned P. pastoris media prepared as described above were analyzed using rpHPLC described in EXAMPLE 1 to determine the concentrations of the native U-ACTX-Hv1a or U+2-ACTX-Hv1a peptide present in the media. Results of this analysis are summarized in Table 2, FIG. 15 and FIG. 16. The average peptide yields with a common mean and standard deviation are 67.0±27.9 mg/L for the U+2-ACTX-Hv1a P. pastoris strains and 42.9±18.3 mg/L for the native U-ACTX-Hv1a strains. A student's t-test indicated that the probability of such differing distributions of yields is far below 1%. The median yield from the U+2-ACTX-Hv1a strains was 79.0 mg/L, far higher than that from the native U-ACTX-Hv1a strains (44.7 mg/L). It is observed that the U+2-ACTX-Hv1a strains had much higher ratios of the strain counts at high peptide yield level than the native U-ACTX-Hv1a strains. All these results support the conclusion that the extra glycine-serine dipeptide at the N-terminus of the U+2-ACTX-Hv1a significantly improved the capacity of yeast transformants to produce this peptide and secrete it into conditioned media.

[0455] Table 2 shows a comparison of peptide yields from P. pastoris strains.

TABLE 2
U + 2 and native U-ACTX-Hv1a Peptide Yield Comparison

| | | U + 2 Yield (total 45 strains) | | | | Native U Yield (total 48 strains) | | | |
|---|---|---|---|---|---|---|---|---|---|
| Normalized | | Strain | Ratio | Overall | Median | Strain | Ratio to | Overall | Median |
| Yield Level | | count | to total | average | Yield | count | total | average | Yield |
| >30 | mg/L | 42 | 93.3% | 67.0 ± 27.9 | 79.0 | 38 | 79.2% | 42.9 ± 18.3 | 44.7 |
| >40 | mg/L | 39 | 86.7% | (mg/L) | (mg/L) | 34 | 70.8% | (mg/L) | (mg/L) |
| >50 | mg/L | 37 | 82.2% | | | 19 | 39.6% | | |
| >60 | mg/L | 34 | 75.6% | | | 3 | 6.3% | | |
| >70 | mg/L | 11 | 24.4% | | | 2 | 4.2% | | |
| >80 | mg/L | 7 | 15.6% | | | 2 | 4.2% | | |
| >90 | mg/L | 6 | 13.3% | | | 0 | 0 | | |
| >100 | mg/L | 6 | 13.3% | | | 0 | 0 | | |

### Example 3

[0456] Expression of One of the Type 3 Sea Anemone Toxins Discovered from Anemonia viridis, Native Av3 and Av3+2 in the Yeast Strain Kluyveromyces lactis.

[0457] Insecticidal peptides to express:

[0458] Av3+2:

(SEQ ID NO: 29)
GSRSCCPCYWGGCPWGQNCYPEGCSGPKV

[0459] Native Av3:

(SEQ ID NO: 30)
RSCCPCYWGGCPWGQNCYPEGCSGPKV

[0460] To express the two non-ICK CRIP peptides above in Kluyveromyces lactis, the pKLAC1 vector and the Kluyveromyces lactis strain, YCT306, were used as in example 1.

[0461] The Av3 and Av3+2 peptide ORF, which encode α-MF::Kex2 cleavage site::Av3 (or Av3+2), were codon-optimized using previously determined K. lactis expression algorithm.

[0462] The optimized Av3+2 expression ORF sequence is follows:

(SEQ ID NO: 31)
aagcttgaaaaaaatgaaattttccactattttagcagcatctacagctt
taatcagtgttgtcatggctgcacctgtgagtaccgaaacagatatagac
gaccttccaatctctgttccagaagaggctttgataggattcatcgattt
gactggtgatgaagtttcattgttaccagtgaataatggtacccatactg
gtattttgttcctaaacaccacaattgctgaagctgcttttgcagataag
gatgatttggagaaaagaggttctagatcatgctgcccttgttactgggg
tggttgtccatggggacaaaactgttatcctgaaggatgttctggtccaa
aggtatgagcggccgc

[0463] This optimized DNA sequence was cloned into pKLAC1 vector using Hind III and Not I restriction sites, resulting in the Av3+2 expression vector, pLB102.

[0464] The optimized native Av3 expression ORF sequence is follows:

(SEQ ID NO: 32)
AAGCTTGAAAAAAATGAAATTTTCCACAATCTTAGCTGCAAGTACTGCTC
TTATTTCTGTTGTGATGGCTGCTCCAGTATCTACCGAAACAGATATCGAT
GATTTGCCAATTTCAGTCCCTGAAGAGGCACTAATCGGATTCATTGACTT
AACCGGTGATGAAGTGAGTTTGTTGCCAGTTAACAACGGTACTCATACAG
GTATATTGTTTTTGAATACCACTATAGCTGAAGCAGCATTCGCTGATAAA
GATGACTTAGAAAAGAGAAGATCATGCTGCCCTTGTTACTGGGGTGGTTG
TCCATGGGGTCAAAATTGTTATCCAGAGGGTTGTTCTGGACCTAAGGTTT
GAGCGGCCGC

[0465] This optimized DNA sequence was cloned into pKLAC1 vector using Hind III and Not I restriction sites, resulting in the native Av3 expression vector, pLB103.

[0466] The expression vectors, pLB102 and pLB103, were then linearized using Sac II restriction endonuclease and transformed into YCT306 strain of K. lactis, using the electroporation transformation method. The resulting transformants grew on YCB agar plate supplemented with 5 mM acetamide, which only the acetamidase-expressing transformants could use efficiently as a metabolic source of nitrogen.

[0467] For insecticidal peptide yield evaluations, 48 colonies of pLB102 transformants and 48 colonies of pLB103 transformants were picked up and inoculated 2.2 mL of the defined K. lactis media with 2% sorbitol added as a carbon source in 48-well deep-well plates with 5 mL volume capacity each well. Cultures were processed at 23.5° C., with shaking at 280 rpm, for six days, when cell densities in the cultures were determined by light absorbance at 600 nm (OD600). Cells were then removed from the cultures by centrifugation at 4000 rpm for 10 minutes. The resulting supernatants (conditioned media) were filtered through 0.2 μm membranes for HPLC yield analysis.

[0468] For the peptide yield evaluation, the filtered conditioned media samples were analyzed on an Agilent 1100 HPLC system equipped with an Onyx monolithic 4.5×100 mm, C18 reverse-phase analytical HPLC column and an auto-injector. HPLC grade water and acetonitrile, both containing 0.1% trifluoroacetic acid, constituted the two mobile phase solvents used for the HPLC analyses. The native Av3 or Av3+2 peak areas in the resulting HPLC chromatographs were used as indication of the peptide concentration in the conditioned media, which were then further normalized to the corresponding final cell densities (as determined by OD600 measurements) as normalized peptide yield.

[0469] Table 3, FIG. 17 and FIG. 18 summarize the Av3+2 and native Av3 normalized peptide yield distributions from the K. lactis strains. The normalized peptide yield is represented by the peptide UV peak area in the HPLC chromatograph divided by the corresponding cell density (represented by the OD600) at the end of the cell culture. The overall averaged normalized peptide yield from the Av3+2 strains was 117.5±50.1 mAu·sec/A, which was statistically significantly higher than that of native Av3 which was 29.8±16.1 mAu·sec/A, by Student's t-test at 99% confidence level. The median normalized peptide yield of the Av3+2 K. lactis strains was 106.7 mAu·sec/A, which was more than three times higher than that of native Av3 strains (31.7 mAu·sec/A). The Av3+2 expression strains had much higher ratios of the strain counts at high yield level than the native Av3 strains (table 3). And as shown in FIG. 18, overall at the any percentile of peptide yield, Av3+2 strains had higher yield than native Av3 strains. All of these results indicated that the addition of the glycine-serine dipeptide to the N-terminus of the Av3 peptide contributes to significant improvement of the peptide yield from yeast transformants expressing this peptide.

TABLE 3
Av3 + 2 and native Av3 Peptide Yield Comparison

| | | Av3 + 2 Yield (pLB102-YCT, total 48 strains) | | | | Av3 (pLB103-YCT, total 48 strains) | | | |
|---|---|---|---|---|---|---|---|---|---|
| Normalized | | Strain | Ratio to | Overall | Median | Strain | Ratio to | Overall | Median |
| Yield Level | | count | total | average | Yield | count | total | average | Yield |
| >30 | mAu · sec/A | 46 | 0.958 | 117.5 ± 50.1 | 106.7 | 21 | 0.438 | 29.8 ± 16.1 | 31.7 |
| >60 | mAu · sec/A | 38 | 0.792 | (mAu · sec/A) | (mAu · sec/A) | 0 | 0 | (mAu · sec/A) | (mAu · sec/A) |
| >90 | mAu · sec/A | 36 | 0.75 | | | 0 | 0 | | |
| >120 | mAu · sec/A | 25 | 0.521 | | | 0 | 0 | | |
| >150 | mAu · sec/A | 16 | 0.333 | | | 0 | 0 | | |
| >180 | mAu · sec/A | 2 | 0.042 | | | 0 | 0 | | |
| >2000 | mAu · sec/A | 1 | 0.021 | | | 0 | 0 | | |

[0470] Crops and Insects

[0471] Specific crops and insects that may be controlled by these methods include the following:

[0472] The present invention may be used for transformation of any plant species, including, but not limited to, monocots and dicots. Crops for which a transgenic approach or PEP would be an especially useful approach include, but are not limited to: alfalfa, cotton, tomato, maize, wheat, corn, sweet corn, lucerne, soybean, sorghum, field pea, linseed, safflower, rapeseed, oil seed rape, rice, soybean, barley, sunflower, trees (including coniferous and deciduous), flowers (including those grown commercially and in greenhouses), field lupins, switchgrass, sugarcane, potatoes, tomatoes, tobacco, crucifers, peppers, sugarbeet, barley, and oilseed rape, Brassica sp., rye, millet, peanuts, sweet potato, cassaya, coffee, coconut, pineapple, citrus trees, cocoa, tea, banana, avocado, fig, guava, mango, olive, papaya, cashew, macadamia, almond, oats, vegetables, ornamentals, and conifers.

[0473] “Pest” includes, but is not limited to: insects, fungi, bacteria, nematodes, mites, ticks, and the like.

[0474] Insect pests include, but are not limited to, insects selected from the orders Coleoptera, Diptera, Hymenoptera, Lepidoptera, Mallophaga, Homoptera, Hemiptera, Orthroptera, Thysanoptera, Dermaptera, Isoptera, Anoplura, Siphonaptera, Trichoptera, and the like. More particularly, insect pests include Coleoptera, Lepidoptera, and Diptera.

[0475] Insects of suitable agricultural, household and/or medical/veterinary importance for treatment with the insecticidal polypeptides include, but are not limited to, members of the following classes and orders:

[0476] The order Coleoptera includes the suborders Adephaga and Polyphaga. Suborder Adephaga includes the superfamilies Caraboidea and Gyrinoidea. Suborder Polyphaga includes the superfamilies Hydrophiloidea, Staphylinoidea, Cantharoidea, Cleroidea, Elateroidea, Dascilloidea, Dryopoidea, Byrrhoidea, Cucujoidea, Meloidea, Mordelloidea, Tenebrionoidea, Bostrichoidea, Scarabaeoidea, Cerambycoidea, Chrysomeloidea, and Curculionoidea. Superfamily Caraboidea includes the families Cicindelidae, Carabidae, and Dytiscidae. Superfamily Gyrinoidea includes the family Gyrinidae. Superfamily Hydrophiloidea includes the family Hydrophilidae. Superfamily Staphylinoidea includes the families Silphidae and Staphylinidae. Superfamily Cantharoidea includes the families Cantharidae and Lampyridae. Superfamily Cleroidea includes the families Cleridae and Dermestidae. Superfamily Elateroidea includes the families Elateridae and Buprestidae. Superfamily Cucujoidea includes the family Coccinellidae. Superfamily Meloidea includes the family Meloidae. Superfamily Tenebrionoidea includes the family Tenebrionidae. Superfamily Scarabaeoidea includes the families Passalidae and Scarabaeidae. Superfamily Cerambycoidea includes the family Cerambycidae. Superfamily Chrysomeloidea includes the family Chrysomelidae. Superfamily Curculionoidea includes the families Curculionidae and Scolytidae.

[0477] Examples of Coleoptera include, but are not limited to: the American bean weevil Acanthoscelides obtectus, the leaf beetle Agelastica alni, click beetles (Agriotes lineatus, Agriotes obscurus, Agriotes bicolor), the grain beetle Ahasverus advena, the summer schafer Amphimallon solstitialis, the furniture beetle Anobium punctatum, Anthonomus spp. (weevils), the Pygmy mangold beetle Atomaria linearis, carpet beetles (Anthrenus spp., Attagenus spp.), the cowpea weevil Callosobruchus maculates, the fried fruit beetle Carpophilus hemipterus, the cabbage seedpod weevil Ceutorhynchus assimilis, the rape winter stem weevil Ceutorhynchus picitarsis, the wireworms Conoderus vespertinus and Conoderus falli, the banana weevil Cosmopolites sordidus, the New Zealand grass grub Costelytra zealandica, the June beetle Cotinis nitida, the sunflower stem weevil Cylindrocopturus adspersus, the larder beetle Dermestes lardarius, the corn rootworms Diabrotica virgifera, Diabrotica virgifera virgifera, and Diabrotica barberi, the Mexican bean beetle Epilachna varivestis, the old house borer Hylotropes bajulus, the lucerne weevil Hypera postica, the shiny spider beetle Gibbium psylloides, the cigarette beetle Lasioderma serricorne, the Colorado potato beetle Leptinotarsa decemlineata, Lyctus beetles' (Lyctus spp.), the pollen beetle Meligethes aeneus, the common cockshafer Melolontha melolontha, the American spider beetle Mezium americanum, the golden spider beetle Niptus hololeucus, the grain beetles Oryzaephilus surinamensis and Oryzaephilus mercator, the black vine weevil Otiorhynchus sulcatus, the mustard beetle Phaedon cochleariae, the crucifer flea beetle Phyllotreta cruciferae, the striped flea beetle Phyllotreta striolata, the cabbage steam flea beetle Psylliodes chrysocephala, Ptinus spp. (spider beetles), the lesser grain borer Rhizopertha dominica, the pea and been weevil Sitona lineatus, the rice and granary beetles Sitophilus oryzae and Sitophilus granaries, the red sunflower seed weevil Smicronyx fulvus, the drugstore beetle Stegobium paniceum, the yellow mealworm beetle Tenebrio molitor, the flour beetles Tribolium castaneum and Tribolium confusum, warehouse and cabinet beetles (Trogoderma spp.), and the sunflower beetle Zygogramma exclamationis.

[0478] Examples of Dermaptera (earwigs) include, but are not limited to: the European earwig Forficula auricularia, and the striped earwig Labidura riparia.

[0479] Examples of Dictvontera include, but are not limited to: the oriental cockroach Blatta orientalis, the German cockroach Blatella germanica, the Madeira cockroach Leucophaea maderae, the American cockroach Periplaneta americana, and the smokybrown cockroach Periplaneta fuliginosa.

[0480] Examples of Diplonoda include, but are not limited to: the spotted snake millipede Blaniulus guttulatus, the flat-back millipede Brachydesmus superus, and the greenhouse millipede Oxidus gracilis.

[0481] The order Diptera includes the Suborders Nematocera, Brachycera, and Cyclorrhapha. Suborder Nematocera includes the families Tipulidae, Psychodidae, Culicidae, Ceratopogonidae, Chironomidae, Simuliidae, Bibionidae, and Cecidomyiidae. Suborder Brachycera includes the families Stratiomyidae, Tabanidae, Therevidae, Asilidae, Mydidae, Bombyliidae, and Dolichopodidae. Suborder Cyclorrhapha includes the Divisions Aschiza and Aschiza. Division Aschiza includes the families Phoridae, Syrphidae, and Conopidae. Division Aschiza includes the Sections Acalyptratae and Calyptratae. Section Acalyptratae includes the families Otitidae, Tephritidae, Agromyzidae, and Drosophilidae. Section Calyptratae includes the families Hippoboscidae, Oestridae, Tachinidae, Anthomyiidae, Muscidae, Calliphoridae, and Sarcophagidae.

[0482] Examples of Diptera include, but are not limited to: the house fly (Musca domestica), the African tumbu fly (Cordylobia anthropophaga), biting midges (Culicoides spp.), bee louse (Braula spp.), the beet fly Pegomyia betae, blackflies (Cnephia spp., Eusimulium spp., Simulium spp.), bot flies (Cuterebra spp., Gastrophilus spp., Oestrus spp.), craneflies (Tipula spp.), eye gnats (Hippelates spp.), filth-breeding flies (Calliphora spp., Fannia spp., Hermetia spp., Lucilia spp., Musca spp., Muscina spp., Phaenicia spp., Phormia spp.), flesh flies (Sarcophaga spp., Wohlfahrtia spp.); the flit fly Oscinella frit, fruitflies (Dacus spp., Drosophila spp.), head and canon flies (Hydrotea spp.), the hessian fly Mayetiola destructor, horn and buffalo flies (Haematobia spp.), horse and deer flies (Chrysops spp., Haematopota spp., Tabanus spp.), louse flies (Lipoptena spp., Lynchia spp., and Pseudolynchia spp.), medflies (Ceratitus spp.), mosquitoes (Aedes spp., Anopheles spp., Culex spp., Psorophora spp.), sandflies (Phlebotomus spp., Lutzomyia spp.), screw-worm flies (Chtysomya bezziana and Cochliomyia hominivorax), sheep keds (Melophagus spp.); stable flies (Stomoxys spp.), tsetse flies (Glossina spp.), and warble flies (Hypoderma spp.).

[0483] Examples of Isontera (termites) include, but are not limited to: species from the families Hodotennitidae, Kalotermitidae, Mastotermitidae, Rhinotennitidae, Serritermitidae, Termitidae, and Termopsidae.

[0484] Examples of Heteroptera include, but are not limited to: the bed bug Cimex lectularius, the cotton stainer Dysdercus intermedius, the Sunn pest Eurygaster integriceps, the tarnished plant bug Lygus lineolaris, the green stink bug Nezara antennata, the southern green stink bug Nezara viridula, and the triatomid bugs Panstrogylus megistus, Rhodnius ecuadoriensis, Rhodnius pallescans, Rhodnius prolixus, Rhodnius robustus, Triatoma dimidiata, Triatoma infestans, and Triatoma sordida.

[0485] Examples of Homoptera include, but are not limited to: the California red scale Aonidiella aurantii, the black bean aphid Aphis fabae, the cotton or melon aphid Aphis gossypii, the green apple aphid Aphis pomi, the citrus spiny whitefly Aleurocanthus spiniferus, the oleander scale Aspidiotus hederae, the sweet potato whitefly Bemesia tabaci, the cabbage aphid Brevicoryne brassicae, the pear psylla Cacopsylla pyricola, the currant aphid Cryptomyzus ribis, the grape phylloxera Daktulosphaira vitifoliae, the citrus psylla Diaphorina citri, the potato leafhopper Empoasca fabae, the bean leafhopper Empoasca solana, the vine leafhopper Empoasca vitis, the woolly aphid Eriosoma lanigerum, the European fruit scale Eulecanium corni, the mealy plum aphid Hyalopterus arundinis, the small brown planthopper Laodelphax striatellus, the potato aphid Macrosiphum euphorbiae, the green peach aphid Myzus persicae, the green rice leafhopper Nephotettix cinticeps, the brown planthopper Nilaparvata lugens, gall-forming aphids (Pemphigus spp.), the hop aphid Phorodon humuli, the bird-cherry aphid Rhopalosiphum padi, the black scale Saissetia oleae, the greenbug Schizaphis graminum, the grain aphid Sitobion avenae, and the greenhouse whitefly Trialeurodes vaporariorum.

[0486] Examples of Isopoda include, but are not limited to: the common pillbug Armadillidium vulgare and the common woodlouse Oniscus asellus.

[0487] The order Lepidoptera includes the families Papilionidae, Pieridae, Lycaenidae, Nymphalidae, Danaidae, Satyridae, Hesperiidae, Sphingidae, Saturniidae, Geometridae, Arctiidae, Noctuidae, Lymantriidae, Sesiidae, and Tineidae.

[0488] Examples of Lepidoptera include, but are not limited to: Adoxophyes orana (summer fruit Tortrix moth), Agrotis ipsolon (black cutworm), Archips podana (fruit tree Tortrix moth), Bucculatrix pyrivorella (pear leafminer), Bucculatrix thurberiella (cotton leaf perforator), Bupalus piniarius (pine looper), Carpocapsa pomonella (codling moth), Chilo suppressalis (striped rice borer), Choristoneura fumiferana (eastern spruce budworm), Cochylis hospes (banded sunflower moth), Diatraea grandiosella (southwestern corn borer), Earls insulana (Egyptian bollworm), Euphestia kuehniella (Mediterranean flour moth), Eupoecilia ambiguella (European grape berry moth), Euproctis chrysorrhoea (brown-tail moth), Euproctis subflava (oriental tussock moth), Galleria mellonella (greater wax moth), Helicoverpa armigera (cotton bollworm), Helicoverpa zea (cotton bollworm), Heliothis virescens (tobacco budworm), Hofmannophila pseudopretella (brown house moth), Homeosoma electellum (sunflower moth), Homona magnanima (oriental tea tree Tortrix moth), Lithocolletis blancardella (spotted tentiform leafminer), Lymantria dispar (gypsy moth), Malacosoma neustria (tent caterpillar), Mamestra brassicae (cabbage armyworm), Mamestra configurata (Bertha armyworm), the hornworms Manduca sexta and Manuduca quinquemaculata, Operophtera brumata (winter moth), Ostrinia nubilalis (European corn borer), Panolis flammea (pine beauty moth), Pectinophora gossypiella (pink bollworm), Phyllocnistis citrella (citrus leafminer), Pieris brassicae (cabbage white butterfly), Plutella xylostella (diamondback moth), Rachiplusia ni (soybean looper), Spilosoma virginica (yellow bear moth), Spodoptera exigua (beet armyworm), Spodoptera frugiperda (fall armyworm), Spodoptera littoralis (cotton leafworm), Spodoptera litura (common cutworm), Spodoptera praefica (yellowstriped armyworm), Sylepta derogata (cotton leaf roller), Tineola bisselliella (webbing clothes moth), Tineola pellionella (case-making clothes moth), Tortrix viridana (European oak leafroller), Trichoplusia ni (cabbage looper), and Yponomeuta padella (small ermine moth).

[0489] Examples of Orthoptera include, but are not limited to: the common cricket Acheta domesticus, tree locusts (Anacridium spp.), the migratory locust Locusta migratoria, the twostriped grasshopper Melanoplus bivittatus, the differential grasshopper Melanoplus dfferentialis, the redlegged grasshopper Melanoplus femurrubrum, the migratory grasshopper Melanoplus sanguinipes, the northern mole cricket Neocurtilla hexadectyla, the red locust Nomadacris septemfasciata, the shortwinged mole cricket Scapteriscus abbreviatus, the southern mole cricket Scapteriscus borellii, the tawny mole cricket Scapteriscus vicinus, and the desert locust Schistocerca gregaria.

[0490] Examples of Phthiraptera include, but are not limited to: the cattle biting louse Bovicola bovis, biting lice (Damalinia spp.), the cat louse Felicola subrostrata, the shortnosed cattle louse Haematopinus eloysternus, the tail-switch louse Haematopinus quadriperiussus, the hog louse Haematopinus suis, the face louse Linognathus ovillus, the foot louse Linognathus pedalis, the dog sucking louse Linognathus setosus, the long-nosed cattle louse Linognathus vituli, the chicken body louse Menacanthus stramineus, the poultry shaft louse Menopon gallinae, the human body louse Pediculus humanus, the pubic louse Phthirus pubis, the little blue cattle louse Solenopotes capillatus, and the dog biting louse Trichodectes canis.

[0491] Examples of Psocoptera include, but are not limited to: the booklice Liposcelis bostrychophila, Liposcelis decolor, Liposcelis entomophila, and Trogium pulsatorium.

[0492] Examples of Siphonaptera include, but are not limited to: the bird flea Ceratophyllus gallinae, the dog flea Ctenocephalides canis, the cat flea Ctenocephalides fells, the human flea Pulex irritans, and the oriental rat flea Xenopsylla cheopis.

[0493] Examples of Symphyla include, but are not limited to: the garden symphylan Scutigerella immaculate.

[0494] Examples of Thysanura include, but are not limited to: the gray silverfish Ctenolepisma longicaudata, the four-lined silverfish Ctenolepisma quadriseriata, the common silverfish Lepisma saccharina, and the firebrat Thennobia domestica;

[0495] Examples of Thysanoptera include, but are not limited to: the tobacco Thrips Frankliniella fusca, the flower Thrips Frankliniella intonsa, the western flower Thrips Frankliniella occidentalis, the cotton bud Thrips Frankliniella schultzei, the banded greenhouse Thrips Hercinothrips femoralis, the soybean Thrips Neohydatothrips variabilis, Kelly's citrus Thrips Pezothrips kellyanus, the avocado Thrips Scirtothrips perseae, the melon Thrips Thrips palmi, and the onion Thrips Thrips tabaci.

[0496] Examples of Nematodes include, but are not limited to: parasitic nematodes such as root-knot, cyst, and lesion nematodes, including Heterodera spp., Meloidogyne spp., and Globodera spp.; particularly members of the cyst nematodes, including, but not limited to: Heterodera glycines (soybean cyst nematode); Heterodera schachtii (beet cyst nematode); Heterodera avenae (cereal cyst nematode); and Globodera rostochiensis and Globodera pailida (potato cyst nematodes). Lesion nematodes include, but are not limited to: Pratylenchus spp.

[0497] In one embodiment, the insecticidal compositions comprising the polypeptides, polynucleotides, cells, vectors, etc., can be employed to treat ectoparasites. Ectoparasites include, but are not limited to: fleas, ticks, mange, mites, mosquitoes, nuisance and biting flies, lice, and combinations comprising one or more of the foregoing ectoparasites. The term “fleas” includes the usual or accidental species of parasitic flea of the order Siphonaptera, and in particular the species Ctenocephalides, in particular C fells and C. cams, rat fleas (Xenopsylla cheopis) and human fleas (Pulex irritans).

[0498] Insect pests of the invention for the major crops include, but are not limited to: Maize: Ostrinia nubilalis, European corn borer; Agrotis ipsilon, black cutworm; Helicoverpa zea, corn earworm; Spodoptera frugiperda, fall armyworm; Diatraea grandiosella, southwestern corn borer; Elasmopalpus lignosellus, lesser cornstalk borer; Diatraea saccharalis, surgarcane borer; Diabrotica virgifera, western corn rootworm; Diabrotica longicornis barberi, northern corn rootworm; Diabrotica undecimpunctata howardi, southern corn rootworm; Melanotus spp., wireworms; Cyclocephala borealis, northern masked chafer (white grub); Cyclocephala immaculata, southern masked chafer (white grub); Popillia japonica, Japanese beetle; Chaetocnema pulicaria, corn flea beetle; Sphenophorus maidis, maize billbug; Rhopalosiphum maidis, corn leaf aphid; Anuraphis maidiradicis, corn root aphid; Blissus leucopterus leucopterus, chinch bug; Melanoplus femurrubrum, redlegged grasshopper; Melanoplus sanguinipes, migratory grasshopper; Hylemya platura, seedcorn maggot; Agromyza parvicornis, corn blot leafminer; Anaphothrips obscrurus, grass Thrips; Solenopsis milesta, thief ant; Tetranychus urticae, twospotted spider mite; Sorghum: Chilo partellus, sorghum borer; Spodoptera frugiperda, fall armyworm; Helicoverpa zea, corn earworm; Elasmopalpus lignosellus, lesser cornstalk borer; Feltia subterranea, granulate cutworm; Phyllophaga crinita, white grub; Eleodes, Conoderus, and Aeolus spp., wireworms; Oulema melanopus, cereal leaf beetle; Chaetocnema pulicaria, corn flea beetle; Sphenophorus maidis, maize billbug; Rhopalosiphum maidis, corn leaf aphid; Sipha flava, yellow sugarcane aphid; Blissus leucopterus leucopterus, chinch bug; Contarinia sorghicola, sorghum midge; Tetranychus cinnabarinus, carmine spider mite; Tetranychus urticae, twospotted spider mite; Wheat: Pseudaletia unipunctata, army worm; Spodoptera frugiperda, fall armyworm; Elasmopalpus lignosellus, lesser cornstalk borer; Agrotis orthogonia, western cutworm; Elasmopalpus lignosellus, lesser cornstalk borer; Oulema melanopus, cereal leaf beetle; Hypera punctata, clover leaf weevil; Diabrotica undecimpunctata howardi, southern corn rootworm; Russian wheat aphid; Schizaphis graminum, greenbug; Macrosiphum avenae, English grain aphid; Melanoplus femurrubrum, redlegged grasshopper; Melanoplus differentialis, differential grasshopper; Melanoplus sanguinipes, migratory grasshopper; Mayetiola destructor, Hessian fly; Sitodiplosis mosellana, wheat midge; Meromyza americana, wheat stem maggot; Hylemya coarctata, wheat bulb fly; Frankliniella fusca, tobacco Thrips; Cephus cinctus, wheat stem sawfly; Aceria tulipae, wheat curl mite; Sunflower: Suleima helianthana, sunflower bud moth; Homoeosoma electellum, sunflower moth; Zygogramma exclamationis, sunflower beetle; Bothyrus gibbosus, carrot beetle; Neolasioptera murtfeldtiana, sunflower seed midge; Cotton: Heliothis virescens, cotton budworm; Helicoverpa zea, cotton bollworm; Spodoptera exigua, beet armyworm; Pectinophora gossypiella, pink bollworm; Anthonomus grandis, boll weevil; Aphis gossypii, cotton aphid; Pseudatomoscelis seriatus, cotton fleahopper; Trialeurodes abutilonea, bandedwinged whitefly; Lygus lineolaris, tarnished plant bug; Melanoplus femurrubrum, redlegged grasshopper; Melanoplus differentialis, differential grasshopper; Thrips tabaci, onion Thrips; Franklinkiella fusca, tobacco Thrips; Tetranychus cinnabarinus, carmine spider mite; Tetranychus urticae, twospotted spider mite; Rice: Diatraea saccharalis, sugarcane borer; Spodoptera frugiperda, fall armyworm; Helicoverpa zea, corn earworm; Colaspis brunnea, grape Colaspis; Lissorhoptrus oryzophilus, rice water weevil; Sitophilus oryzae, rice weevil; Nephotettix nigropictus, rice leafhopper; Blissus leucopterus leucopterus, chinch bug; Acrosternum hilare, green stink bug; Soybean: Pseudoplusia includens, soybean looper; Anticarsia gemmatalis, velvetbean caterpillar; Plathypena scabra, green cloverworm; Ostrinia nubilalis, European corn borer; Agrotis ipsilon, black cutworm; Spodoptera exigua, beet armyworm; Heliothis virescens, cotton budworm; Helicoverpa zea, cotton bollworm; Epilachna varivestis, Mexican bean beetle; Myzus persicae, green peach aphid; Empoasca fabae, potato leafhopper; Acrosternum hilare, green stink bug; Melanoplus femurrubrum, redlegged grasshopper; Melanoplus differentialis, differential grasshopper; Hylemya platura, seedcorn maggot; Sericothrips variabilis, soybean Thrips; Thrips tabaci, onion Thrips; Tetranychus turkestani, strawberry spider mite; Tetranychus urticae, twospotted spider mite; Barley: Ostrinia nubilalis, European corn borer; Agrotis ipsilon, black cutworm; Schizaphis graminum, greenbug; Blissus leucopterus leucopterus, chinch bug; Acrosternum hilare, green stink bug; Euschistus servus, brown stink bug; Delia platura, seedcorn maggot; Mayetiola destructor, Hessian fly; Petrobia latens, brown wheat mite; Oil Seed Rape: Brevicoryne brassicae, cabbage aphid; Phyllotreta cruciferae, Flea beetle; Mamestra configurata, Bertha armyworm; Plutella xylostella, Diamond-back moth; Delia ssp., Root maggots.

[0499] In some embodiments, the insecticidal compositions can be employed to treat combinations comprising one or more of the foregoing insects.

[0500] The insects that are susceptible to the peptides of this invention include but are not limited to the following: Cyt toxins affect families such as: Blattaria, Coleoptera, Collembola, Diptera, Echinostomida, Hemiptera, Hymenoptera, Isoptera, Lepidoptera, Neuroptera, Orthoptera, Rhabditida, Siphonoptera, and Thysanoptera. Genus-Species are indicated as follows: Actebia-fennica, Agrotis-ipsilon, A.-segetum, Anticarsia-gemmatalis, Argyrotaenia-citrana, Artogeia-rapae, Bombyx mori, Busseola-fusca, Cacyreus-marshall, Chilo-suppressalis, Christoneura-fumiferana, C.-occidentalis, C.-pinus pinus, C.-rosacena, Cnaphalocrocis-medinalis, Conopomorpha-cramerella, Ctenopsuestis-obliquana, Cydia-pomonella, Danaus-plexippus, Diatraea-saccharallis, D.-grandiosella, Earias-vittella, Elasmolpalpus-lignoselius, Eldana-saccharina, Ephestia-kuehniella, Epinotia-aporema, Epiphyas-postvittana, Galleria-mellonella, Genus-Species, Helicoverpa-zea, H.-punctigera, H.-armigera, Heliothis-virescens, Hyphantria-cunea, Lambdina-fiscellaria, Leguminivora-glycinivorella, Lobesia-botrana, Lymantria-dispar, Malacosoma-disstria, Mamestra-brassicae, M. configurata, Manduca-sexta, Marasmia-patnalis, Maruca-vitrata, Orgyia-leucostigma, Ostrinia-nubilalis, O.-furnacalis, Pandemis-pyrusana, Pectinophora-gossypiella, Perileucoptera-coffeella, Phthorimaea-opercullela, Pianotortrix-octo, Piatynota-stultana, Pieris-brassicae, Plodia-interpunctala, Plutella-xylostella, Pseudoplusia-includens, Rachiplusia-nu, Sciropophaga-incertulas, Sesamia-calamistis, Spilosoma-virginica, Spodoptera-exigua, S.-frugiperda, S.-littoralis, S.-exempta, S.-litura, Tecia-solanivora, Thaumetopoea-pityocampa, Trichoplusia-ni, Wiseana-cervinata, Wiseana-copularis, Wiseana-jocosa, Blattaria-Blattella, Collembola-Xenylla, C.-Folsomia, Echinostomida-Fasciola, Hemiptera-Oncopeltrus, He.-Bemisia, He.-Macrosiphum, He.-Rhopalosiphum, He.-Myzus, Hymenoptera-Diprion, Hy.-Apis, Hy.-Macrocentrus, Hy.-Meteorus, Hy.-Nasonia, Hy.-Solenopsis, Isopoda-Porcellio, Isoptera-Reticulitermes, Orthoptera-Achta, Prostigmata-Tetranychus, Rhabitida-Acrobeloides, R.-Caenorhabditis, R.-Distolabrellus, R.-Panagrellus, R.-Pristionchus, R.-Pratylenchus, R.-Ancylostoma, R.-Nippostrongylus, R.-Panagrellus, R.-Haemonchus, R.-Meloidogyne, and Siphonaptera-Ctenocephalides.

[0501] We describe Part II with the following description and summary:

[0502] We describe a peptide with an N-terminal dipeptide which is added to and operably linked to a known peptide, wherein said N-terminal dipeptide is comprised of one nonpolar amino acid on the N-terminal of the dipeptide and one polar amino acid on the C-terminal of the dipeptide, wherein said peptide is selected from a CRIP (Cysteine Rich Insecticidal Peptide), such as from an ICK peptide, or a Non-ICK peptide. The N-terminal dipeptide which is added to and operably linked to a known peptide, wherein said N-terminal dipeptide is comprised of one nonpolar amino acid on the N-terminal of the dipeptide and one polar amino acid on the C-terminal of the dipeptide. The N-terminal dipeptide has a non-polar amino acid as the N-terminal amino acid of the N-terminal dipeptide that can be selected from glycine, alanine, proline, valine, leucine, isoleucine, phenylalanine and methionine and a polar amino acid of the C-terminal amino acid of the N-terminal peptide can be selected from serine, threonine, cysteine, asparagine, glutamine, histidine, tryptophan, and tyrosine.

[0503] The N-terminal dipeptide can have a non-polar amino acid as the N-terminal amino acid of the N-terminal dipeptide selected from glycine, alanine, proline, valine, leucine, isoleucine, phenylalanine and methionine and said polar amino acid of the C-terminal amino acid of the N-terminal peptide is selected from serine, threonine, cysteine, asparagine, glutamine, histidine, tryptophan, and tyrosine. The N-terminal dipeptide can and preferably is comprised of glycine-serine.

[0504] We describe a peptide with a N-terminal dipeptide which is added to and operably linked to a known peptide, wherein said N-terminal dipeptide is comprised of one nonpolar amino acid on the N-terminal of the dipeptide and one polar amino acid on the C-terminal of the dipeptide, wherein said peptide is selected from a PFIP (Pore Forming Insecticidal Protein), or it could be selected from a CRIP (Cysteine Rich Insecticidal Peptide), such as from an ICK peptide, or a Non-ICK peptide. The Non-ICK peptide could be a sea anemone, origin peptide like Av2 or Av3 and the preferred dipeptide is comprised of glycine-serine. The ICK peptide could be from a spider like the ACTX peptides and the preferred dipeptide is comprised of glycine-serine. The PFIP could be a Bt protein, like any of those disclosed herein, in the sequence listing and know to one skilled in the art who reads these description and the preferred dipeptide is comprised of glycine-serine.

[0505] As noted above we explain that the N-terminal dipeptide is comprised of one nonpolar amino acid on the N-terminal of the dipeptide and one polar amino acid on the C-terminal of the dipeptide and the non-polar amino acid from the N-terminal amino acid of the N-terminal dipeptide can be selected from glycine, alanine, proline, valine, leucine, isoleucine, phenylalanine and methionine and preferably the non-polar amino acid is glycine. And we explain and claim that any of the peptides in the paragraph below and any of the peptides in this paragraph can act independently and should be treated independently and all of the possible combinations are claimed independently.

[0506] As noted above we explain that the N-terminal dipeptide is comprised of one nonpolar amino acid on the N-terminal of the dipeptide and one polar amino acid on the C-terminal of the dipeptide and the polar amino acid of the C-terminal amino acid of the N-terminal peptide is selected from serine, threonine, cysteine, asparagine, glutamine, histidine, tryptophan, tyrosine and preferably the polar amino acid is serine. And we explain and claim that any of the peptides in the paragraph above and any of the peptides in this paragraph can act independently and should be treated independently and all of the possible combinations are claimed independently.

[0507] The peptide to which the N-terminal dipeptide is attached can be any peptide, any toxic peptide, any insecticidal peptide, any PFIP, any CRIP, a CRIP that is a ACTX peptide (which is an example of an ICK peptide), CRIP is a sea anemone peptide (which is an example of a Non-ICK peptide), it can be a PFIP, the PFIP can be a Bt protein, the Bt protein can be cry, cyt, VIP and it can be like any of these peptides as disclosed herein, or in the sequence listing, or known by one skilled in the art who reads these descriptions and understands the document.

[0508] We specifically note that these procedures are useful and we claim the procedures themselves and the products of the procedures both as independent claims and as process by product claims for making any insecticidal peptide and in particular any peptide selected from any of the peptides or sources of peptides including Atrax or Hadronyche, as disclosed herein or elsewhere, as well as any insecticidal peptide with fragments thereof including mature, pre, and pro peptide versions of said peptides and sequence numbers and the peptide in SEQ. ID. NO. 5.

[0509] These peptides are useful and the procedures can all be made and used where there is one nonpolar amino acid at the N-terminal end and one polar amino acid at the C-terminal end, and the dipeptide of said non-polar amino acid is selected from glycine, alanine, proline, valine, leucine, isoleucine, phenylalanine and methionine, and it is preferably glycine or gly, and the polar amino acid is selected from serine, threonine, cysteine, asparagine, glutamine, histidine, tryptophan and tyrosine and it is preferably serine or ser. The dipeptide gly-ser is most preferred. The dipeptide can be operably linked to any known peptide, any toxic peptide, any insecticidal peptide, any of the peptides including Atrax or Hadronyche, disclosed herein any insecticidal peptide with fragments thereof including mature, pre, and pro peptide versions of said peptides and sequence numbers, any mature insecticidal peptide, the toxic peptide comprises SEQ. ID. NO; 6, or the toxic peptide comprises GSQYC VPVDQ PCSLN TQPCC DDATC TQERN ENGHT VYYCR A (SEQ ID NO: 5).

[0510] We also describe and claim the dipeptide Gly-Ser, nucleotides encoding the dipeptide Gly-Ser selected from GGT, GGC, GGA, or GGG, any of which encodes Gly, and TCT, TCC, TCA, TCG, AGT, and AGC, any of which encodes Ser, and those nucleotides linked to any of the proteins and the process and the products of the process. We describe and claim these nucleotides which code for these peptides operably linked to the 5′ terminus of the DNA sequence encoding any peptide disclosed herein.

[0511] We explain and disclose a process for increasing the yield of insecticidal peptides which are produced from yeast expression systems comprising the addition of any dipeptide to the N-terminus of any insecticidal peptide. The process and product by process for increasing the yield used the dipeptide as discussed in the paragraphs above.

[0512] We specifically discuss the procedures, products, process and products by process with any insecticidal peptide that inhibits both voltage-gated Calcium channels and Calcium-activated potassium channels in insects, with peptide origins from any species of Australian Funnel-web spider, a spider is selected from the Australian Funnel-web spiders of genus Atrax or Hadronyche, including Hadronyche versuta. We also specifically describe and claim insecticidal peptides that are not ICK motif peptide such as peptides with origins from any species of venomous sea anemone, we refer to the proteins as examples of CRIP motif peptide that are Non-ICK. We disclose and have tested and show that the procedures work with proteins from the sea anemone genus Anemonia, and specifically from selected species, Anemonia viridis. We believe to a scientific certainty that the methods will work with insecticidal peptides that contain contains 20-100 amino acids and 2-6 disulfide bonds, and with insecticidal peptide is any insecticidal peptide with at least 50%, 55%, 60%, 65%, 70%, 75%, 80%, 85%, 90%, 95%, 96%, 97%, 98%, or 99% or greater sequence identity to SEQ ID NO: 5, SEQ ID NO: 6, Av2 and Av3.

[0513] We specifically describe and claim the procedures when used with any species of yeast, including but not limited to any species of the genuses Saccharomyces, Pichia, Kluyveromyces, Hansenula, Yarrowia or Schizosaccharomyces and the species Saccharomyces includes any species of Saccharomyces, and preferably we disclose the Saccharomyces species Saccharomyces cerevisiae. We specifically disclose Saccharomyces cerevisiae species is selected from following strains: INVSc1, YNN27, S150-2B, W303-1B, CG25, W3124, JRY188, BJ5464, AH22, GRF18, W303-1A and BJ3505. We specifically disclose Pichia species including any species of Pichia and preferably the Pichia species, Pichia pastoris, and preferably the Pichia pastoris is selected from following strains: Bg08, Y-11430, X-33, GS115, GS190, JC220, JC254, GS200, JC227, JC300, JC301, JC302, JC303, JC304, JC305, JC306, JC307, JC308, YJN165, KM71, MC100-3, SMD1163, SMD1165, SMD1168, GS241, MS105, any pep4 knock-out strain and any prb1 knock-out strain, as well as Pichia pastoris is selected from following strains: Bg08, X-33, SMD1168 and KM71. We specifically disclose Kluyveromyces species includes any species of Kluyveromyces, and preferably Kluyveromyces lactis, and we teach that the stain of Kluyveromyces lactis can be but is not required to be selected from following strains: GG799, YCT306, YCT284, YCT389, YCT390, YCT569, YCT598, MW98-8C, MS1, CBS293.91, Y721, MD2/1, PM6-7A, WM37, K6, K7, 22AR1, 22A295-1, SD11, MG1/2, MSK110, JA6, CMK5, HP101, HP108 and PM6-3C, in addition to Kluyveromyces lactis species is selected from GG799 and YCT306.

[0514] We specifically describe and claim the procedures when used with any species of yeast, including but not limited to any species of Hansenula species including any species of Hansenula and preferably Hansenula polymorpha. We specifically describe and claim the procedures when used with any species of yeast, including but not limited to any species of Yarrowia species including any species of Yarrowia and preferably Yarrowia lipolytica. We specifically describe and claim the procedures when used with any species of yeast, including but not limited to any species of Schizosaccharomyces species including any species of Schizosaccharomyces and preferably Schizosaccharomyces pombe.

[0515] We specifically describe and claim the procedures when used with any species of yeast, including but not limited to any species of Hansenula species including any species of Hansenula and preferably Hansenula polymorpha. We specifically describe and claim the procedures when used with any species of yeast, including but not limited to any species of Yarrowia species including any species of Yarrowia and preferably Yarrowia lipolytica. We specifically describe and claim the procedures when used with any species of yeast, including but not limited to any species of Schizosaccharomyces species including any species of Schizosaccharomyces and preferably Schizosaccharomyces pombe.

### PART III. IN THIS PART WE DESCRIBE COMBINATIONS OF “CRIPS” AND “PFIPS”

[0516] A large number of venom peptides have been characterized as “insecticidal.” However, despite numerous reports, few have found any utility in the market as actual or effective insecticides. In fact, only ω-ACTX-Hv1a has been reported to be toxic by oral administration to the American lone star tick Amblyomma americanum. No other spider toxins have been reported to possess oral activity even in the modified gut of ticks. There has been a report that the bioavailability of these peptides may be increased by coupling them to a carrier protein such as snowdrop lectin (Galanthus nivalis agglutinin, GNA). Mukherjee, A. K.: Sollod, B. L.; Wikel, S. K.; King, G. F. “Orally active acaricidal peptide toxins from spider venom.” Toxicon 2006, 47, 182-187. Garlic lectins are reported to increase the absorption of toxins across the insect midgut Fitches, E, et al., Insect Sci., 2008, 15, 483-495, Fitches, E., et. al., Insect Biochem. Mol. Biol. 2008, 38, 905-915. Firches, E. et. al., J. Insect Physiol. 2004, 50, 61-71. For example, fusion of the insecticidal spider toxin U2-SGTX-Sf1a (SFI1) to GNA significantly increased its oral toxicity to the tomato moth Lacanobia oleracea Down, R. E. et. al., Pest Manag. Sci. 2006, 62, 77-85, as well as the rice brown planthopper Nilaparvata lugens and the peach-potato aphid Myzus persicae. Surprisingly, a thioredoxin-ω-HXTX-Hv1a fusion protein was found to be insecticidal in Helicoverpa armigera and Spodoptera littoralis caterpillars by topical application. See Khan, S. A. Transgenic Res. 2006, 15, 349-357. (although the fusion protein was applied topically in a solution containing high levels of imidazole, a compound known to have contact insecticidal activity; Pence, R. J. California Agric. 1965, 13-15. These efforts and findings clearly indicate the importance of developing means to enhance the oral bioavailability of venom toxins. We think these efforts are also misdirected. In this disclosure we teach that fusion of insecticidal peptides to carrier proteins that bind to the gut of insects is unnecessary. We describe a better way to deliver the “toxin” in insecticidal peptides to insects. Without wishing to be bound by theory, it is our theory that PFIPS, or Pore Forming Insecticidal Proteins, act by selectively binding to receptors in the insect gut. The PFIPS then, in subsequent events, act to disrupt the membrane of the epithelial cells lining the gut. When an appropriate CRIP or TMOF is also timely introduced to the gut at the same time the PFIPS are acting on the insect gut, the result is apoptosis and death of the cells lining the gut. Thus, the gut lining is broached and simultaneously the venomous peptides, often large peptides isolated from venom, can pass through the gut and sicken or kill the target insect. Surprisingly, insects that have developed resistance to Bt proteins have no defenses and show no resistance at all to even low levels of Bt, when a PFIP like Bt is administered to an insect in combination with CRIP or TMOF, that is a toxic peptide, but one with properties that do not act like a PFIPS such as Bt. We provide data showing that certain combinations of co-administered CRIPS and PFIPS can provide more than double the killing and stopping power than would be expected from similar concentration applications of either a CRIP or PFIPS applied individually.

[0517] Examples of a PFIP include the cry and VIP proteins from Bt organisms. Bt proteins like the cry proteins disrupt the insect gut membrane allowing for adventitious infection (sepsis) of the insect by gut flora. In the absence of gut microbes, Bt is not insecticidal. Broderick, Nichole PNAS Vol. 103, No. 41 (2006). Hence one would expect that the mechanism shown to cause Bt mortality (infection) would be mitigated in those insects showing Bt resistance, and it is mitigated in those insects. Bt resistant insects show little gut disruption even when fed high levels of Bt proteins, like cry. What we have surprisingly discovered is that somehow even though these insects guts no longer display the dramatic effects of Bt on the gut, that is they are truly resistant, when they are exposed to insecticidal peptides of a certain type, like the CRIPS and TMOF which have a very different mode of action than PFIPS like Bt, then these very resistant insects have no resistance what so ever. The disappearance of resistance in a “Bt resistant” insect is surprising, and we show this happens, with our data, in the examples provided herein. This result was completely unexpected. Now however we understand, and we can use this knowledge to explain how sublethal amounts of a PFIP protein like Bt, can be “converted” into a lethal cocktail such that if two (2) or more sublethal amounts of insecticidal protein are co-administered, then the combination of proteins becomes lethal to insects which are otherwise thought to be too large, or too resistant to be susceptible to toxic peptides.

[0518] It is surprising that insect resistance to PFIPs alone does not confer resistance to the combination of PFIPS with CRIPS and or TMOF. Because of the mechanism of action of the PFIPS one would expect that the PFIP, like a Bt protein, would no longer contribute to the toxic effects of the combination of PFIPS with CRIPS and or TMOF. Instead the opposite happens and the combination has a greater than expected level of activity as shown with our data.

[0519] Insects have developed resistance to Bt. Attempts to combat this resistance have resulted in the use of many different subtypes of Bt. We teach here that insect resistance can be overcome by co-application of venom peptides. Since the most common mode of resistance (mode 1, prior ref) Pence, R. J. “The antimetabolite imidazole as a pesticide.” California Agric. 1965, 13-15. is down regulation of Bt receptors that line the gut, one would expect insect resistance would be maintained in Bt resistant insects because the number of receptors is insufficient to render the insect vulnerable to sepsis by gut flora. What we have discovered and believe, and our data supports our theory in dramatic fashion (see examples below), is that even with Bt resistant insects there remains sufficient membrane abnormalities that exposure to even low levels of Bt, when combined with certain small “toxic” insecticidal peptides, having a different type of mode of action than Bt, will surprisingly cause Bt resistant insects to stop feeding or die, We believe this is because the gut lining is still disrupted in these resistant insects, just enough to allow the passage of the much smaller venom peptides characteristic of either CRIP and TMOF types of insecticidal peptides.

[0520] In this document we do not consider TMOF peptides or Trypsin modulating oostatic factor (TMOF) peptides which have been identified as a potential larvicides, see D. Borovsky, Journal of Experimental Biology 206, 3869-3875, to be a CRIP type of insecticidal peptide. We define a CRIP peptide as one with various cysteines according to our definitions herein. TMOF peptides does not fit the motif that we have described as a CRIP peptide. Please see the definition section toward the beginning of these documents for a definition of CRIP and TMOF. We discuss combining CRIP and or TMOF type of proteins with a different type of protein we describe as PFIPS.

[0521] PFIPS are Pore Forming Insecticidal Proteins which are also defined in the definition section. One example of one type of PFIP are various proteins of the widely used group of proteins derived from Bt, such as cry, cyt and VIP. These are effective insecticides used for crop protection in the form of both plant incorporated protectants and foliar sprays. Commercial formulations of such Bt proteins are widely used to control insects at the larval stage.

[0522] In contrast to PFIPS, CRIPS such as Inhibitory cysteine knot or ICK peptides are very different group of peptides that also have insecticidal activity, but they act with a very different mode of action. In this document there is no overlap of a PFIP protein with a CRIP protein, the two groups are separate and distinct. ICK peptides and even Non-ICK peptides are both considered CRIPS in this document. CRIPS are often toxic to naturally occurring biological target species, usually insects or arachnids of some type. Often CRIP peptides can have arthropod origins such as the venoms of scorpions or spiders, this venom origin is very common with ICKs. CRIP may be delivered to their physiological site of action in various ways, for example by delivering the toxin directly to the insect's gut or internal organs by injection, by application to an insect locus and uptake from surface contact, or by inducing the insect to consume the toxin from its food. For example, in some embodiments, an insect may consume the toxin by feeding on a plant treated (e.g., sprayed, powdered, wetted, or otherwise contacted) with one or more toxins and/or compositions thereof. In yet other embodiments, an insect may consume the toxin by feeding upon a transgenic plant that has been transformed to express one or more toxins.

[0523] The peptides described herein may be formulated as either applied products or through transgenic plants face challenges. It can be difficult to successfully produce such peptides on a commercial scale, with reproducible peptide formation and folding. Cost controls can be challenging. The wide variety, unique properties and special nature of peptides, combined with the huge variety of possible production techniques present an overwhelming number of approaches to peptide production. Commercial products have their own significant challenges. Peptides are often unstable when applied in the environment of a crop. UV irradiation and other factors can cause Bt insecticides to decay rapidly in the environment, often in as little as a few hours. Further, commercial effectiveness can change. Both Bt spray on products and the transgenic Bt proteins used as plant incorporated protectant face emerging insect resistance.

[0524] A product is needed that enhances the acute activity, improves resistance performance, or extends the duration of action in order to increase insect control and crop protection.

[0525] Here we present combinations of Bt Protein and ICK and TMOF peptides in various combinations. We describe examples of these novel combinations. The new combinations, products, methods, and their formulation and uses thereof are described and claimed herein.

[0526] Cysteine Rich Insecticidal Peptides (CRIPS) in Insecticidal Combinations

[0527] Cysteine rich insecticidal peptides (CRIPS) are peptides rich in cysteine which form disulfide bonds. The cysteine-cysteine disulfide bonds play a significant role in the toxicity of these insecticidal peptides which are exemplified by both inhibitory cysteine knot or ICK peptides and by examples of toxic peptides with disulfide bonds that are not considered ICK peptides (non-ICK CRIPS) such as peptides from the sea anemone, like Av2 and Av3 peptides. These cysteine-cysteine disulfide bonds stabilized toxic peptides (CRIPS) can have remarkable stability when exposed to the environment. Many ICK peptides are isolated from venomous animals such as spiders, scorpions, and snakes and are toxic to insects. TMOF peptides are known to have larvicidal activity. Av2 and Av3 peptides are isolated from sea anemones. We also describe a different group of peptides that act on the lining of the insect gut. We call these PFIPS for Pore Forming Insecticidal Proteins. Most well-known examples of a PFIPS are the Bt proteins, well known because of their specific pesticidal activities and commercial applications. Surprisingly, we discovered that, when the combination of these peptides, PFIPS and CRIPS are combined and administered so they act together in the gut (co-administration of the combination not required only the combination of the activity in the gut is needed) they become highly effective at controlling insects. For example, one of the preferred combinations would be to combine a Bt protein with an ICK peptides, or sea anemone peptides they create a highly effective insecticide with a potency much greater than one would expect.

[0528] We describe an insecticidal combination peptide composition comprising both a PFIP (Pore Forming Insecticidal Proteins) in combination with a either a CRIP and/or a TMOF type of insecticidal protein. Note that CRIP includes such insecticidal proteins as ICK (Inhibitor Cystine Knot) peptides, and Non-ICK proteins but TMOF peptides are not considered CRIP proteins. CRIP proteins can include Non-ICK proteins like the proteins first identified in sea anemones, for example Av2 or Av3. The composition can be in the ratio of PFIP: to CRIP and or TMOF, on a dry weight basis, from about any or all of the following ratios: 99:1, 95:5, 90:10, 85:15, 80:20, 75:25, 70:30, 65:35, 60:40, 55:45, 50:50, 45:55, 40:60, 35:65, 30:70, 25:75, 20:80, 15:85, 10:90, 5:95 and 1:99, or any combination of any two of these values. We also describe a composition where the ratio of PFIP to CRIP or TMOF on a on a dry weight basis, is selected from about the following ratios: 50:50, 45:55, 40:60, 35:65, 30:70, 25:75, 20:80, 15:85, 10:90, 5:95, 1:99, 0.5:99.5, 0.1:99.9 and 0.01:99.99 or any combination of any two of these values. CRIP, ICK, Non-ICK CRIP and TMOF can be either 100% of the peptide combined with Bt, or either peptide in any combination that totals 100% of both ICK+TMOF peptide can be combined with Bt.

[0529] In another embodiment the combination of mixtures of PFIP in combination with CRIP or TMOF peptides includes either or both of the PFIP and CRIP, ICK and non ICK peptides which are derived from more than 1 different types or bacterial strain origins for either one or both of PFIP, ICK and TMOF peptides. By bacterial strain origins we mean the peptides can be described as having been expressed by a bacterial strain that expresses the peptides with the understanding that many peptides are also artificial in the sense that they are no longer all developed from animal or bacterial strains.

[0530] We also disclose compositions where either or both of mixtures of PFIP in combination with CRIP or TMOF peptides and or mixtures of PFIP in combination with CRIP plus or with TMOF peptides are derived from between 2 and 5, 2-15, 2-30, 5-10, 5-15, 5-30, 5-50 and various other different types or bacterial strains origins of either one or both of the proteins. We disclose a composition where either or both of the proteins are encoded by from 2 to 15 different types or bacterial strain origins of either one or both of the PFIP in combination with CRIP or TMOF peptides. And any of these combinations of 2-5, 2-15, 2-30, 5-10, 5-15, 5-30, 5-50 and various other different types and mixtures of PFIP in combination with CRIP or TMOF peptides can contribute more than at least 1% of each strain type to the composition.

[0531] We disclose compositions of Bt and ICK, Bt and TMOF peptides or Bt and ICK+TMOF peptides of claims 1-6 where the total concentration of Bt and ICK peptide, Bt and TMOF peptides or BT and ICK+TMOF peptides in the mixture is selected from the following percent concentrations: 0, 1, 5, 10, 15, 20, 25, 30, 35, 40, 45, 50, 55, 60, 65, 70, 75, 80, 85, 90, 95, 99 or 100%, or any range between any two of these values, and the remaining percentage of the mixture is comprised of excipients. We disclose compositions wherein the insecticidal combination peptide is produced using a genetic cassette that further comprises an ERSP (Endoplasmic Reticulum Signal Peptide) operably linked to the insecticidal ICK peptide, wherein said ERSP is linked at the N-terminal of the insecticidal ICK peptide. We disclose compositions wherein the insecticidal combination peptide is produced using a genetic cassette that further comprises an ERSP (Endoplasmic Reticulum Signal Peptide) operably linked to the insecticidal ICK peptide, wherein said ERSP is linked at the N-terminal of the insecticidal ICK peptide, wherein the ERSP is BAAS.

[0532] We disclose compositions wherein said combination of peptides is produced using a genetic cassette that further comprises a dipeptide operably linked to the insecticidal ICK and of TMOF peptide, wherein said dipeptide is linked at the N-terminal of the insecticidal ICK peptide; and wherein the dipeptide is comprised of one nonpolar amino acid on the N-terminal of the dipeptide and one polar amino acid on the C-terminal of the dipeptide, including embodiments where the dipeptide is glycine-serine, including embodiments where the insecticidal ICK peptide is any insecticidal peptide that is a positive allosteric modulators of the nicotinic acetylcholine receptor, and may also be a dual antagonist to insect voltage-gated Ca²⁺ channels and voltage-gated K⁺ channels. See Chambers et al., Insecticidal spider toxins are high affinity positive allosteric modulators of the nicotinic acetylcholine receptor. FEBS Lett. 2019 June; 593(12):1336-1350; and Windley et al., Lethal effects of an insecticidal spider venom peptide involve positive allosteric modulation of insect nicotinic acetylcholine receptors. Neuropharmacology. 2017 December; 127:224-242, the disclosures of which are incorporated herein by reference in their entireties. Also included are embodiments where the insecticidal ICK peptide origins from any species of Australian Funnel-web spider, including embodiments where the spider is selected from the Australian Funnel-web spiders of genus Atrax or Hadronyche, including embodiments where the spider is selected from the Australian Funnel-web spiders of genus Hadronyche, including embodiments where the spider is selected from the Australian Blue Mountains Funnel-web, Hadronyche versuta, including embodiments where the insecticidal ICK peptide is Hybrid-ACTX-Hv1a, including embodiments where the insecticidal ICK peptide contains 20-100 amino acids and 2-4 disulfide bonds, including embodiments where said insecticidal ICK peptide is any insecticidal peptide with at least 50%, 55%, 60%, 65%, 70%, 75%, 80%, 85%, 90%, 95%, 96%, 97%, 98%, or 99% or greater sequence identity to any of the ICK sequences disclosed herein, including embodiments where the insecticidal ICK peptide is selected from publications incorporated by reference, including embodiments where the Bt protein is any insecticidal Bt protein, including embodiments where the Bt protein is a Cry or Cyt protein, including embodiments where the Bt protein is selected from the group consisting of a Cry1, Cry3, TIC851, CryET70, Cry22, TIC901, TIC201, TIC407, TIC417, a binary insecticidal protein CryET80, and CryET76, a binary insecticidal protein TIC100 and TIC101, a combination of an insecticidal protein ET29 or ET37 with an insecticidal protein TIC810 or TIC812 and a binary insecticidal protein PS149B1, including embodiments where the Bt protein is selected from a Cry protein, a Cry1A protein or a Cry1F protein, including embodiments where the Bt protein is a combination Cry1F-Cry1A protein, including embodiments where the Bt protein comprises an amino acid sequence at least 90% identical to SEQ ID NOs: 10, 12, 14, 26, 28, or 34 of U.S. Pat. No. 7,304,206, including embodiments where the Bt Protein is Dipel, including embodiments where the Bt protein is Thuricide.

[0533] We disclose a composition comprising the nucleotides of: Bt (Bacillus thuringiensis) protein; and an insecticidal ICK (Inhibitor Cystine Knot) peptide, Bt and TMOF peptide or BT and ICK+TMOF peptides in a transformed plant or plant genome; where the ratio of Bt to ICK, Bt and TMOF peptides or BT and ICK+TMOF peptides, on a dry weight basis, is selected from about the following ratios: 99:1, 95:5, 90:10, 85:15, 80:20, 75:25, 70:30, 65:35, 60:40, 55:45, 50:50, 45:55, 40:60, 35:65, 30:70, 25:75, 20:80, 15:85, 10:90, 5:95 and 1:99, or any combination of any two of these values.

[0534] We disclose transformed plant or plant genome wherein the ratio of Bt to ICK, Bt and TMOF peptides or BT and ICK+TMOF peptides on a dry weight basis, is selected from about the following ratios: 50:50, 45:55, 40:60, 35:65, 30:70, 25:75, 20:80, 15:85, 10:90, 5:95, 1:99, 0.5:99.5, 0.1:99.9 and 0.01:99.99 or any combination of any two of these values. The transformed plant or plant genome may have either or both of the Bt and ICK peptides are derived from more than 1 different type or bacterial strain origin of Bt or ICK peptides, or either or both of the Bt and ICK peptides are derived from between 2 and 5 different type or bacterial strain origin of either Bt or ICK peptides or both Bt and ICK peptides are derived from between 2 and 5 different types or strain origins, or either or both of the Bt and ICK peptides are derived from 2 to 15 different type or bacterial strain origins of either or both of Bt and ICK peptides and at least one strain of either Bt or ICK or both Bt and ICK peptides encoded by more than one copy of the Bt or ICK genes, or either or both of the Bt and ICK peptides are derived from more than one different type or bacterial strain origin of Bt and/or ICK peptides where all the strains of Bt and/or ICK peptides contribute more than at least 1% of each strain type to said composition, or either or both of the Bt and ICK peptides are derived from 2 to 5 different type or bacterial strain origins of either or both of Bt and ICK peptides and at least one strain of either Bt or ICK or both Bt and ICK peptides encoded by more than one copy of the Bt of ICK genes, or the total concentration of Bt and ICK peptide in the composition can be selected from the following percent concentrations: 0, 1, 5, 10, 15, 20, 25, 30, 35, 40, 45, 50, 55, 60, 65, 70, 75, 80, 85, 90, 95, 99 or 100%, or any range between any two of these values, and the remaining percentage of the mixture is comprised of excipients.

[0535] The compositions and plants described herein include an insecticidal combination peptide produced using a genetic cassette that further comprises an ERSP (Endoplasmic Reticulum Signal Peptide) operably linked to the insecticidal ICK peptide, or to a TMOF peptide wherein said ERSP is linked at the N-terminal of the insecticidal ICK or TMOF peptide. In another embodiment the insecticidal combination peptide is produced using a genetic cassette that further comprises an ERSP (Endoplasmic Reticulum Signal Peptide) operably linked to the insecticidal ICK peptide, wherein said ERSP is linked at the N-terminal of the insecticidal ICK peptide, wherein the ERSP is BAAS. In another embodiment the transgenic plant incorporating and expressing the combination peptides from the nucleotides described herein, wherein said combination peptide is produced using a genetic cassette that further comprises nucleotides expressing a dipeptide operably linked to the insecticidal ICK or TMOF peptide, wherein said dipeptide is linked at the N-terminal of the insecticidal ICK peptide; and wherein the dipeptide is comprised of one nonpolar amino acid on the N-terminal of the dipeptide and one polar amino acid on the C-terminal of the dipeptide. In another embodiment the transgenic plant has a dipeptide that is a glycine-serine. In another embodiment the transgenic plant has insecticidal ICK peptides expressed that are comprised of an insecticidal peptide combination of ICK and Bt proteins. The transgenic plants can have an insecticidal ICK peptide derived from any species of Australian Funnel-web spider, or the Australian Funnel-web spiders of genus Atrax or Hadronyche, and the Australian Blue Mountains Funnel-web, Hadronyche versuta.

[0536] We describe and claim a transgenic plant wherein the insecticidal ICK peptide expressed is Hybrid-ACTX-Hv1a, and or the insecticidal ICK peptide expressed may contain 20-100 amino acids and 2-4 disulfide bonds and or the insecticidal ICK peptide is any insecticidal peptide with at least 50%, 55%, 60%, 65%, 70%, 75%, 80%, 85%, 90%, 95%, 96%, 97%, 98%, or 99% or greater sequence identity to any of the ICK peptides described herein. The transgenic plants disclosed can contain any known Bt protein, including peptides where the Bt protein is a Cry or Cyt protein, and/or the Bt protein is selected from the group consisting of a Cry1, Cry3, TIC851, CryET70, Cry22, TIC901, TIC201, TIC407, TIC417, a binary insecticidal protein CryET80, and CryET76, a binary insecticidal protein TIC100 and TIC101, a combination of an insecticidal protein ET29 or ET37 with an insecticidal protein TIC810 or TIC812 and a binary insecticidal protein PS149B1. The Bt protein can be selected from a Cry protein, a Cry1A protein or a Cry1F protein, or a combination Cry1F-Cry1A protein, or it comprises an amino acid sequence at least 90% identical to sequences 10, 12, 14, 26, 28, or 34 of U.S. Pat. No. 7,304,206. We describe a transgenic plant wherein the Bt protein is Dipel and we describe a transgenic plant wherein the Bt protein is Thuricide.

[0537] We specifically describe and claim a transformed plant expressing the peptides described herein where the average concentration of Bt and ICK peptide, Bt and TMOF peptides or BT and ICK+TMOF peptides, in an average leaf of a transformed plant is about: 1, 5, 10, 15, 20, 25, 30, 35, 40, 45, 50, 55, 60, 65, 70, 75, 80, 85, 90, 95 or 99%, or any range between any two of these values. We specifically describe and claim a transformed plant expressing properly folded toxic peptides in the transformed plant. We specifically describe and claim a transformed plant expressing properly folded combination toxic peptides in the transformed plant and to cause the accumulation of the expressed and properly folded toxic peptides in said plant and to cause an increase in the plant's yield or resistance to insect damage and they control insect pests in crops and forestry. We describe plants made by any of the products and processes described herein.

[0538] We describe expression cassettes comprising any of the nucleotides which express any peptides described herein, including embodiments having a functional expression cassette incorporated into a transformed plant, comprising nucleotides that code for any of the peptides disclosed herein or that could be made by one skilled in the art given the teaching disclosed herein. We describe and claim procedures for the generation of transformed plants having or expressing any of the peptides described herein.

[0539] We describe the use of any of the peptides or nucleotides described herein, to make a plant or transform these peptides or nucleotides into a plant, and methods and techniques for generating these proteins in plants and/or expression cassettes comprising any of the peptides and methods to transform them into a plant genome and any method of using, making, transforming any of the described peptides or nucleotides into a plant and methods and techniques for generating transformed plants having or expressing any of the peptides and functional expression cassettes in plants comprising any of the disclosed peptides and their corresponding nucleotides and any plants made by the products and processes described herein.

[0540] In some embodiments we disclose a chimeric gene comprising a promoter active in plants operatively linked to the nucleic acids or expression cassettes as described herein. We disclose a method of making, producing, or using the combination of genes described herein. We disclose a recombinant vector comprising the combination of genes described herein. We disclose a method of making, producing, or using the recombinant vector. We disclose a transgenic host cell comprising the combination of genes described herein and the method of making, producing or using the transgenic host cell, which can be a transgenic plant cell and we disclose a method of making, producing or using such a transgenic plant cell as well as the transgenic plant comprising the transgenic plant cell and how to make and use the transgenic plant. We disclose transgenic plant and seed having the properties described herein that is derived from corn, soybean, cotton, rice, sorghum, switchgrass, sugarcane, alfalfa, potatoes or tomatoes. The transgenic seed may have a chimeric gene that we describe herein. We describe methods of making, producing or using the transgenic plant and or seed of this disclosure.

[0541] We also describe methods of using the invention and provide novel formulations. The invention is most useful to control insects. We describe a method of controlling an insect comprising: Applying Bt (Bacillus thuringiensis) protein to said insect; and Applying an insecticidal ICK (Inhibitor Cystine Knot) peptide to said insect. This method may be used where the Bt protein and the insecticidal ICK peptide, Bt and TMOF peptides or BT and ICK+TMOF peptides are applied together at the same time in the same compositions or separately in different compositions and at different times. The Bt protein and the insecticidal ICK peptide, and or TMOF peptide may be applied sequentially, and it may be applied to (Bt protein)-resistant insects. The ratio of Bt to ICK or TMOF, on a dry weight basis, can be selected from at least about the following ratios: 99:1, 95:5, 90:10, 85:15, 80:20, 75:25, 70:30, 65:35, 60:40, 55:45, 50:50, 45:55, 40:60, 35:65, 30:70, 25:75, 20:80, 15:85, 10:90, 5:95 and 1:99, or any combination of any two of these values. The ratio of Bt to ICK, on a dry weight basis, can be selected from about the following ratios: 50:50, 45:55, 40:60, 35:65, 30:70, 25:75, 20:80, 15:85, 10:90, 5:95, 1:99, 0.5:99.5, 0.1:99.9 and 0.01:99.99 or any combination of any two of these values. Either or both of the Bt and ICK peptides are derived from more than 1 different types or bacterial strain origins of Bt and ICK peptides, Bt and TMOF peptides or BT and ICK+TMOF peptides. Either or both of the Bt and ICK, Bt and TMOF peptides or BT and ICK+TMOF peptides are derived from between 2 and 5 different types or bacterial strain origins of either Bt or ICK peptides or both Bt and ICK peptides. Either or both of the Bt and ICK peptides are derived from 2 to 15 different types or bacterial strain origins of either or both of Bt and ICK peptides and at least one strain of either Bt or ICK or both Bt and ICK peptides are encoded by more than one copy of the Bt or ICK genes. Either one or both of the Bt and ICK peptides are derived from more than 1 different types or bacterial strain origins of Bt and/or ICK peptides with all the strains of Bt and/or ICK peptides contributing more than at least 1% of the peptides from each strain type in said composition. Either or both of the Bt and ICK peptides are derived from 2 to 5 different types or bacterial strain origins of either one or both of Bt and ICK peptides and at least one strain of either Bt or ICK or both Bt and ICK peptides are encoded by more than one copy of the Bt or ICK genes. The total concentration of Bt and ICK, Bt and TMOF peptides or BT and ICK+TMOF peptides peptide in the mixture is selected from the following percent concentrations: 0, 1, 5, 10, 15, 20, 25, 30, 35, 40, 45, 50, 55, 60, 65, 70, 75, 80, 85, 90, 95, 99 or 100%, or any range between any two of these values, and the remaining percentage of the mixture is comprised of excipients.

[0542] The methods can be used where the insecticidal combination peptide is produced using a genetic cassette that further comprises an ERSP (Endoplasmic Reticulum Signal Peptide) operably linked to the insecticidal ICK peptide, or TMOF peptide; wherein said ERSP is linked at the N-terminal of the insecticidal ICK peptide. In some embodiments the insecticidal combination peptides used are produced using a genetic cassette that further comprises an ERSP (Endoplasmic Reticulum Signal Peptide) operably linked to the insecticidal ICK peptide, wherein said ERSP is linked at the N-terminal of the insecticidal ICK peptide, wherein the ERSP is BAAS.

[0543] Any of the peptides and plants described herein can be used to control insects, their growth and damage, especially their damage to plants. The combination Bt protein and insecticidal ICK peptide can be applied by being sprayed on a plant, or the insect's locus, or the locus of a plant in need of protecting.

[0544] We also describe formulations comprising: Bt proteins; and an insecticidal ICK, and or an insecticidal TMOF peptide which can include any of the compositions described herein or capable of being made by one skilled in the art given this disclosure. Some of the described formulations include the use of a polar aprotic solvent, and or water, and or where the polar aprotic solvent is present in an amount of 1-99 wt %, the polar protic solvent is present in an amount of 1-99 wt %, and the water is present in an amount of 0-98 wt %. The formulations include formulations where the Bt protein is from the product Dipel and where the insecticidal ICK peptide is a hybrid-ACTX-Hv1a peptide. The polar aprotic solvent formulations are especially effective when they contain MSO. MSO is a methylated seed oil and surfactant blend that uses methyl esters of soya oil in amounts of between about 80 and 85 percent petroleum oil with 15 to 20 percent surfactant.

[0545] This disclosure provides numerous examples of suitable CRIP type peptides, ICK peptides, NON-ICK CRIP peptides, and TMOF peptides in addition to many type of PFIP type peptides such as Bt and VIP proteins and peptides, when combined, provide novel insecticidal products, and these may be referred to herein as “combination peptides.” Peptides suitable for use with this invention are described in this document, and specific examples are disclosed in the sequence listing. The peptides in the sequence listing are provided only as examples to illustrate the invention and to provide direction and meaning for one skilled in the art. It should be understood that the sequence listing does not provide a full and complete list of all CRIPS, ICKs, NON-ICK CRIPS, and TMOF not does it provide a full and complete list of all PFIPS. Insects may be treated with combination peptides applied directly, such as sprayed onto an insect or its locus, or the combination peptides can be applied indirectly, such as delivered in a transgenic plant. First we provide detailed written descriptions and examples of CRIP peptides like ICK (Section I), and these are also provided above. Then we provide detailed written descriptions and examples of TMOF peptide (Section II). Next we provide detailed written descriptions and examples of Bt proteins (Section III). It should be understood that the application provides these examples as a means to illustrate and not limit the bounds of the patent and the claimed invention. Any suitable Bt protein and ICK peptide or TMOF peptide could be combined in the manner described and result in an effective insecticide. After describing the ICK and Bt proteins, applicant describes various pesticide compositions (Section IV). Plant transformations using both ICK and Bt proteins are described (Section V). Descriptions and examples of CRIP and Bt Combinations (Section VI). TMOF and Bt proteins combinations are described (Section VII). We provide non limiting examples and descriptions of how the ICK and Bt proteins have been combined to produce a highly effective insecticide, with results and data provided herein.

[0546] Section I. The ICK Motif Peptides or ICK Peptides.

[0547] “ICK motif,” “ICK motif protein,” “inhibitor cystine knot motif,” “Toxic insect ICK peptides” or “ICK peptides” means a 16 to 60 amino acid peptide with at least 6 half-cystine core amino acids having three disulfide bridges, wherein the 3 disulfide bridges are covalent bonds and of the six half-cystine residues the covalent disulfide bonds are between the first and fourth, the second and fifth, and the third and sixth half-cystines, of the six core half-cystine amino acids starting from the N-terminal amino acid. The ICK motif also comprises a beta-hairpin secondary structure, normally composed of residues situated between the fourth and sixth core half-cystines of the motif, the hairpin being stabilized by the structural crosslinking provided by the motif s three disulfide bonds. Note that additional cysteine/cystine or half-cystine amino acids may be present within the inhibitor cystine knot motif.

[0548] This motif is common in peptides isolated from the venom of numerous species. Invertebrate species include spiders and scorpions, other examples are numerous, even snake venom has been known to have peptides having the ICK motif. Specific examples of insecticidal ICK peptides are the “U peptides” disclosed herein and in published patents and patent applications and its homologies, which have an origin from the venoms of Australian Funnel-web spiders. These proteins are also referred to as ACTX peptides from the Australian Blue Mountains Funnel-web Spider, but the procedures described herein are useful and may be applied to any protein with the ICK motif. The following documents are incorporated by reference in the United States in their entirety, are known to one skilled in the art, and have all been published.

[0549] Examples of peptide toxins with the ICK motif protein can be found in the following references. The N-type calcium channel blocker ω-Conotoxin was reviewed by Lew, M. J. et al. “Structure-Function Relationships of ω-Conotoxin GVIA” Journal of Biological Chemistry, Vol. 272, No. 18, Issue of May 2, pp. 12014-12023, 1997. A summary of numerous arthropod toxic ICK peptides different spider and scorpion species was reviewed in, Quintero-Hernandez, V. et al. “Scorpion and Spider Venom Peptides: Gene Cloning and Peptide Expression” Toxicon, 58, pp. 644-663, 2011. The three-dimensional structure of Hanatoxin1 using NMR spectroscopy was identified as an inhibitor cystine knot motif in Takahashi, H. et al. “Solution structure of hanatoxin1, a gating modifier of voltage-dependent K+ channels: common surface features of gating modifier toxins” Journal of Molecular Biology, Volume 297, Issue 3, 31 Mar. 2000, pp. 771-780. The isolation and identification of cDNA encoding a scorpion venom ICK toxin peptide, Opicalcine1, was published by Zhu, S. et al. “Evolutionary origin of inhibitor cystine knot peptides” FASEB J., 2003 Sep. 17, (12):1765-7, Epub 2003 Jul. 3. The sequence-specific assignment and the secondary structure identification of BgK, a K+ channel-blocking toxin from the sea anemone Bunodosoma granulifera, was disclosed by Dauplais, M. et al. “On the convergent evolution of animal toxins” Journal of Biological Chemistry. 1997 Feb. 14; 272(7): 4302-9. A review of the composition and pharmacology of spider venoms with emphasis on polypeptide toxin structure, mode of action, and molecular evolution showing cystine bridges, cystine knot formations and the “knotting-type” fold was published by Escoubas, P. et al. “Structure and pharmacology of spider venom neurotoxins” Biochimie, Vol. 82, Issues 9-10, 10 Sep. 2000, pp. 893-907. The purified peptide, iberiotoxin, an inhibitor of the Ca2+-activated K+ channel, from scorpion (Buthus tamulus) venom was disclosed in Galvez, A. et al. “Purification and characterization of a unique, potent, peptidyl probe for the high conductance calcium-activated potassium channel from venom of the scorpion Buthus tamulus” Journal of Biological Chemistry, 1990 Jul. 5; 265(19): 11083-90. The purified peptide, charybdotoxin, an inhibitor of the Ca2+-activated K+ channel, from the venom of the scorpion Leiurus quinquestriatus was disclosed in Gimenez-Gallego, G. et al. “Purification, sequence, and model structure of charybdotoxin, a potent selective inhibitor of calcium-activated potassium channels” Proc Natl Acad Sci, 1988 May; 85(10): 3329-3333. From these and other publications, one skilled in the art should be able to readily identify proteins and peptides having what we describe as the ICK motif, ICK motif protein or the “inhibitor cystine knot motif.”

[0550] The ICK motif protein can be any protein with the ICK motif and is between 16 and 60 amino acids in length, with at least 6 cysteine residues that create covalent cross-linking disulfide bonds in the proper order. Some ICK motif peptides have between 26-60 amino acids in length. Some ICK motif proteins are between 16-48 amino acids in length. Some ICK motif proteins are between 26-48 amino acids in length. Some ICK motif proteins are between 30-44 amino acids in length. ICK motif proteins with natural insecticidal activity are preferred but ICK motif proteins with other types of activity such as salt and frost resistance are known to those skilled in the art and are claimed herein. Examples of insecticidal ICK motif proteins include the ACTX peptides and genes, and including all of the peptides and their coding genes known as Magi6.

[0551] Examples of insecticidal ICK motif proteins include the ACTX peptides and genes and include all of the peptides and their coding genes as described in the references provided above and herein. Specific examples of ICK motif proteins and peptides disclosed for purposes of providing examples and not intended to be limiting in any way, are the peptides and their homologies as described above, and in particular peptides and nucleotides which originate from the venoms of Australian Funnel-web spiders. The following documents are incorporated by reference in the United States in their entirety, are known to one skilled in the art, and have all been published. They disclose numerous ICK motif proteins which, their full peptide sequence, their full nucleotide sequence, are specifically disclosed and are incorporated by reference, and in addition the full disclosures are incorporated by reference including all of their sequence listings. Their sequence listings are known and published. See the following: U.S. Pat. No. 7,354,993 B2, issued Apr. 8, 2008, specifically the peptide and nucleotide sequences listed in the sequence listing, and numbered SEQ ID NOs: 33-71, from U.S. Pat. No. 7,354,993 B2, and those named U-ACTX polypeptides, and these and other toxins that can form 2 to 4 intra-chain disulfide bridges, and variants thereof, and the peptides appearing on columns 4 to 9 and in FIG. 2 of U.S. Pat. No. 7,354,993 B2. Other specific sequences can be found in EP patent 1 812 464 B1, published and granted Aug. 10, 2008, see Bulletin 2008/41, specifically the peptide and nucleotide sequences listed in the sequence listing, and other toxins that can form 2 to 4 intra-chain disulfide bridges, and those sequences numbered SEQ ID NOs: 33-71, and sequences named U-ACTX polypeptides, and variants thereof, and the peptides appearing in paragraphs 0023 to 0055, and appearing in EP patent 1 812 464 B1, see FIG. 1 of EP 1 812 464 B1.

[0552] Described and incorporated by reference in order to disclose the peptides identified herein are homologous variants of sequences mentioned, having homology to such sequences or referred to herein, which are also identified and claimed as suitable for making special according to the processes described herein, including all homologous sequences having at least any of the following percent identities to any of the sequences disclosed here or to any sequence incorporated by reference: 50%, 55%, 60%, 65%, 70%, 75%, 80%, 85%, 90%, 95%, 96%, 97%, 98%, or 99% or greater identity or 100% identity to any and all sequences identified in the patents noted above, and to any other sequence identified herein, including each and every sequence in the sequence listing of this application. When the term homologous or homology is used herein with a number such as 50% or greater, then what is meant is percent identity or percent similarity between the two peptides. When homologous or homology is used without a numeric percent then it refers to two peptide sequences that are closely related in the evolutionary or developmental aspect in that they share common physical and functional aspects, like topical toxicity and similar size (i.e., the homolog being within 100% greater length or 50% shorter length of the peptide specifically mentioned herein or identified by reference herein as above).

[0553] Described and incorporated by reference to describe the peptides identified herein are toxic ICK peptides including the following: the U peptide and its variants; found in, isolated from, or derived from, spiders of the genus Atrax or Hadronyche, including the genus species, Hadronyche versuta, or the Blue Mountain funnel web spider, Atrax robustus, Atrax formidabilis, Atrax infensus, including toxins known as U-ACTX polypeptides, U-ACTX-Hv1a, rU-ACTX-Hv1a, rU-ACTX-Hv1b, or mutants or variants, especially peptides of any of these types and especially those less than about 200 amino acids but greater than about 10 amino acids, and especially peptides less than about 150 amino acids but greater than about 20 amino acids, especially peptides less than about 100 amino acids but greater than about 25 amino acids, especially peptides less than about 65 amino acids but greater than about 25 amino acids, especially peptides less than about 55 amino acids but greater than about 25 amino acids, especially peptides of about 37 or 39 or about 36 to 42 amino acids, especially peptides with less than about 55 amino acids but greater than about 25 amino acids, especially peptides with less than about 45 amino acids but greater than about 35 amino acids, especially peptides with less than about 115 amino acids but greater than about 75 amino acids, especially peptides with less than about 105 amino acids but greater than about 85 amino acids, especially peptides with less than about 100 amino acids but greater than about 90 amino acids, including peptide toxins of any of the lengths mentioned here that can form 2, 3 and or 4 or more intrachain disulfide bridges, including toxins that disrupt calcium channel currents, including toxins that disrupt potassium channel currents, especially toxins that disrupt insect calcium channels or Us thereof, especially toxins or variants thereof of any of these types, and any combination of any of the types of toxins described herein that have oral or topical insecticidal activity, can be made special by the processes described herein.

[0554] The U peptides from the Australian Funnel Web Spider, genus Atrax and Hadronyche are particularly suitable and work well when placed in combination according to the methods, procedures or processes described by this invention. Examples of such suitable peptides tested and with data are provided herein. The following species are also specifically known to carry toxic ICK peptides suitable for being made special by the process of this invention. The following species are specifically named: Atrax formidabillis, Atrax infensus, Atrax robustus, Hadronyche infensa, Hadronyche versuta. Any toxic ICK peptides derived from any of the genus listed above and/or genus species and homologous to the U peptide are suitable for being made special according to the process in this invention.

[0555] The Examples in this specification are not intended to, and should not be used to limit the invention, they are provided only to illustrate the invention.

[0556] As noted above, many peptides are suitable candidates for combinations with Bt protein. The sequences noted above, below and in the sequence listing are especially suitable peptides that can be made special, and some of these have been made special according to this invention with the results shown in the examples below.

[0557] Examples of toxic ICK insect peptides are well known and can be found in numerous references. They can be identified by their peptidic nature and their activity, usually oral or injection insecticidal activity. Here we provide a few examples to better illustrate and describe the invention, but the invention is not limited to these examples. All of these examples and others not shown here are descriptive of new materials, described and claimed here for the first time.

[0558] Toxic ICK insect peptides are peptides of greater than 5 amino acid residues and less than 3,000 amino acid residues. They range in molecular weight from about 550 Da to about 350,000 Da. Toxic ICK insect peptides have some type of insecticidal activity. Typically they show activity when injected into insects but most do not have significant activity when applied to an insect topically. The insecticidal activity of toxic ICK insect peptides is measured in a variety of ways. Common methods of measurement are widely known to those skilled in the art. Such methods include, but are not limited to determination of median response doses (e.g., LD₅₀, PD₅₀, LC₅₀, ED₅₀) by fitting of dose-response plots based on scoring various parameters such as: paralysis, mortality, failure to gain weight, etc. Measurements can be made for cohorts of insects exposed to various doses of the insecticidal formulation in question. Analysis of the data can be made by creating curves defined by probit analysis and/or the Hill Equation, etc. In such cases, doses would be administered by hypodermic injection, by hyperbaric infusion, by presentation of the insecticidal formulation as part of a sample of food or bait, etc.

[0559] Toxic ICK insect peptides or ICK peptides are defined here as all peptides shown to be insecticidal upon delivery to insects either by hypodermic injection, hyperbaric infusion, or upon per os delivery to an insect (i.e., by ingestion as part of a sample of food presented to the insect). This class of peptides thus comprises, but is not limited to, many peptides produced naturally as components of the venoms of spiders, mites, scorpions, snakes, snails, etc. This class also comprises, but is not limited to, various peptides produced by plants (e.g., various lectins, ribosome inactivating proteins, and cysteine proteases), and various peptides produced by entomopathogenic microbes (e.g. the Cry1/Bt protein family of proteins produced by various Bacillus species.)

[0560] The insecticidal peptides may be selected from insecticidal venom, for example the venom of a spider. The spider may be an Australian funnel web spider. The peptides from may be from the genus of Atrax or Hadronyche, including U-ACTX-Hv1a and its analogs. Specific peptide examples from spiders are described in the sequence listing provided herein. These peptides can be combined with Bt protein using the procedures described herein.

[0561] ICK Peptide Sequence Examples

[0562] The following documents are incorporated by reference in the US in their entirety, in other jurisdictions where allowed and they are of common knowledge given their publication. In addition they are incorporated by reference and known specifically for their sequence listings to the extent they describe peptide sequences. See the following:

[0563] US Patents:

[0564] U.S. Pat. No. 5,763,568, issued Jun. 9, 1998, incorporated herein in its entirety, specifically the sequences in the sequence listing, and those numbered 33-58, and those known as “kappa” or “omega” toxins, including those that can form 2-4 intrachain disulphide bridges, and the peptides appearing on columns 2 and 4, and Table 5, and in FIG. 5, FIG. 15, FIG. 16, FIG. 17, FIG. 18.

[0565] U.S. Pat. No. 5,959,182, issued Sep. 28, 1999, incorporated herein in its entirety, specifically the sequences in the sequence listing, and those numbered 33-58 and those known as “kappa” or “omega” toxins, including toxins that can form 2-4 intrachain disulphide bridges, and the peptides appearing on columns 2 and 4, and Table 5, and in FIG. 5, FIG. 15, FIG. 16, FIG. 17, FIG. 18.

[0566] U.S. Pat. No. 6,583,264 B2, issued Jun. 24, 2003, and U.S. Pat. No. 7,173,106 B2, issued Feb. 6, 2007, incorporated herein in its entirety, specifically sequence number 1, named “omega-atracotoxin-Hv2a or ω-atracotoxin-Hv2a, including toxins that can form 2-4 intrachain disulphide bridges.

[0567] U.S. Pat. No. 7,279,547 B2, issued Oct. 9, 2007, incorporated herein in its entirety, specifically the sequences in the sequence listing, and those numbered 33-67, and variants of co-atracotoxin-Hv2a, toxins that can form 2-4 intrachain disulphide bridges, and the peptides appearing on columns 4-8 of the specification, and in FIG. 3 and FIG. 4.

[0568] U.S. Pat. No. 7,354,993 B2, issued Apr. 8, 2008, incorporated herein in its entirety, specifically the peptide sequences listed in the sequence listing, and those numbered 33-71, and those named U-ACTX polypeptides, toxins that can form 2-4 intrachain disulphide bridges, and variants thereof, and the peptides appearing on columns 4-9 of the specification and in FIG. 1.

[0569] EP patent 1 812 464 B1, published and granted Aug. 10, 2008 Bulletin 2008/41, incorporated herein in its entirety, specifically the peptide sequences listed in the sequence listing, toxins that can form 2-4 intrachain disulphide bridges, and those as numbered 33-71, and those named U-ACTX polypeptides, and variants thereof, and the peptides appearing in paragraphs 0023 to 0055, and appearing in FIG. 1.

[0570] Described and incorporated by reference to the peptides identified herein are homologous variants of sequences mentioned, have homology to such sequences or referred to herein which are also identified and claimed as suitable for making special according to the processes described herein including but not limited to all homologous sequences including homologous sequences having at least any of the following percent identities to any of the sequences disclosed her or to any sequence incorporated by reference: 30%, 35%, 40%, 45%, 50%, 55%, 60%, 65%, 70%, 75%, 80%, 85%, 90% or 95% or greater identity to any and all sequences identified in the patents noted above, and to any other sequence identified herein, including each and every sequence in the sequence listing of this application. When the term homologous or homology is used herein with a number such as 30% or greater then what is meant is percent identity or percent similarity between the two peptides. When homologous or homology is used without a numeric percent then it refers to two peptide sequences that are closely related in the evolutionary or developmental aspect in that they share common physical and functional aspects like topical toxicity and similar size within 100% greater length or 50% shorter length or peptide.

[0571] Described and incorporated by reference to the peptides identified herein that are derived from any source mentioned in the US and EP patent documents referred to above, including but not limited to the following: toxins isolated from plants and insects, especially toxins from spiders, scorpions and plants that prey on or defend themselves from insects, such as, funnel web spiders and especially Australian funnel web spiders, including toxins found in, isolated from or derived from the genus Atrax or Hadronyche, including the genus species, Hadronyche versuta, or the Blue Mountain funnel web spider, Atrax robustus, Atrax formidabilis, Atrax infensus including toxins known as “atracotoxins,” “co-atracotoxins,” “kappa” atracotoxins, “omega” atracotoxins also known as ω-atracotoxin, U-ACTX polypeptides, U-ACTX-Hv1a, rU-ACTX-Hv1a, rU-ACTX-Hv1b, or mutants or variants, especially peptides of any of these types and especially those less than about 200 amino acids but greater than about 10 amino acids, and especially peptides less than about 150 amino acids but greater than about 20 amino acids, especially peptides less than about 100 amino acids but greater than about 25 amino acids, especially peptides less than about 65 amino acids but greater than about 25 amino acids, especially peptides less than about 55 amino acids but greater than about 25 amino acids, especially peptides of about 37 or 39 or about 36 to 42 amino acids, especially peptides with less than about 55 amino acids but greater than about 25 amino acids, especially peptides with less than about 45 amino acids but greater than about 35 amino acids, especially peptides with less than about 115 amino acids but greater than about 75 amino acids, especially peptides with less than about 105 amino acids but greater than about 85 amino acids, especially peptides with less than about 100 amino acids but greater than about 90 amino acids, including peptide toxins of any of the lengths mentioned here that can form 2, 3 and or 4 or more intrachain disulphide bridges, including toxins that disrupt calcium channel currents, including toxins that disrupt potassium channel currents, especially insect calcium channels or hybrids thereof, especially toxins or variants thereof of any of these types, and any combination of any of the types of toxins described herein that have topical insecticidal activity, can be made special by the processes described herein.

[0572] Venomous peptides from the Australian Funnel Web Spider, genus Atrax and Hadronyche are particularly suitable and work well when treated by the methods, procedures or processes described by this invention. These spider peptides, like many other toxic ICK peptides, including especially are toxic scorpion and toxic plant peptides, become topically active or toxic when treated by the processes described by this invention. Examples of suitable peptides tested and resulting data are provided herein. In addition to the organisms mentioned above, the following species are also specifically know to carry toxins suitable for being made special by the process of this invention. The following species are specifically named: Agelenopsis aperta, Androctonus australis Hector, Antrax formidabillis, Antrax infensus, Atrax robustus, Bacillus thuringiensis, Bothus martensii Karsch, Bothus occitanus tunetanus, Buthacus arenicola, Buthotus judaicus, Buthus occitanus mardochei, Centruroides noxius, Centruroides suffusus suffusus, Hadronyche infensa, Hadronyche versuta, Hadronyche versutus, Hololena curta, Hottentotta judaica, Leiurus quinquestriatus, Leiurus quinquestriatus hebraeus, Leiurus quinquestriatus quinquestriatus, Oldenlandia affinis, Scorpio maurus palmatus, Tityus serrulatus, Tityus zulianu. Any peptidic toxins from any of the genus listed above and or genus species are suitable for being made special according to the process in this invention.

[0573] The Examples in this specification are not intended to, and should not be used to limit the invention, they are provided only to illustrate the invention.

[0574] As noted above, many peptides are suitable candidates as the subject of the process to make special. The sequences noted above, below and in the sequence listing are especially suitable peptides that can be made special, and many of these have been made special according to this invention with the results shown in the examples below.

[0575] The Examples in this specification are not intended to, and should not be used to limit the invention, they are provided only to illustrate the invention.

[0576] As noted above, many peptides are suitable candidates as the subject of the process for the plant expression as PIP. The sequences noted above, below and in the sequence listing are especially suitable peptides that can be expressed in plants as PEP, and some of these have been expressed in plants as PEP according to this invention with the results shown in the examples below.

(one letter code).
SEQ ID NO: 1042
GSQYC VPVDQ PCSLN TQPCC DDATC TQERN ENGHT VYYCR A

[0577] Named “U+2-ACTX-Hv1a,” It has disulfide bridges at positions: 5-20, 12-25, 19-39. The molecular weight is 4564.85 Daltons.

[0578] Another example of an ICK motif insecticidal protein is SEQ ID NO: 1010.

(one letter code)
SEQ ID NO: 661
QYCVP VDQPC SLNTQ PCCDD ATCTQ ERNEN GHTVY YCRA

[0579] SEQ ID NO: 661, named “Hybrid-ACTX-Hv1a,” has disulfide bridges at positions: 3-18, 10-23, 17-37. The molecular weight is 4426.84 Daltons.

(one letter code)
SEQ ID NO: 593
SPTCI PSGQP CPYNE NCCSQ SCTFK ENENG NTVKR CD
(three letter code)
SEQ ID NO: 593
Ser Pro Thr Cys Ile Pro Ser Gly Gln Pro Cys Pro
Tyr Asn Glu Asn Cys Cys Ser Gln Ser Cys Thr Phe
Lys Glu Asn Glu Asn Gly Asn Thr Val Lys Arg Cys
Asp

[0580] Named “ω-ACTX-Hv1a” it has disulfide bridges at positions: 4-18, 11-22 and 17-36. The molecular weight is 4096.

(one letter code)
SEQ ID NO: 650
GSSPT CIPSG QPCPY NENCC SQSCT FKENE NGNTV KRCD
(three letter code)
SEQ ID NO: 650
Gly Ser Ser Pro Thr Cys Ile Pro Ser Gly Gln Pro
Cys Pro Tyr Asn Glu Asn Cys Cys Ser Gln Ser Cys
Thr Phe Lys Glu Asn Glu Asn Gly Asn Thr Val Lys
Arg Cys Asp

[0581] Named “ω-ACTX-Hv1a+2” it has disulfide bridges at positions: 6-20, 13-24 and 19-38. The molecular weight is 4199.

(one letter code)
SEQ ID NO: 651
GSAIC TGADR PCAAC CPCCP GTSCK AESNG VSYCR KDEP
(three letter code)
SEQ ID NO: 651
Gly Ser Ala Ile Cys Thr Gly Ala Asp Arg Pro Cys
Ala Ala Cys Cys Pro Cys Cys Pro Gly Thr Ser Cys
Lys Ala Glu Ser Asn Gly Val Ser Tyr Cys Arg Lys
Asp Glu Pro

[0582] Named “rκ-ACTX-Hv1c” it has disulfide bridges at positions: 5-19, 12-24, 15-16, 18-34. The molecular weight is 3912.15

(three letter code)
SEQ ID NO: 652
Gly Ser Gln Tyr Cys Val Pro Val Asp Gln Pro Cys
Ser Leu Asn Thr Gln Pro Cys Cys Asp Asp Ala Thr
Cys Thr Gln Glu Arg Asn Glu Asn Gly His Thr Val
Tyr Tyr Cys Arg Ala

[0583] Named “rU-ACTX-Hv1a (“Hybrid”)+2” it has disulfide bridges at positions: 5-20, 12-25, 19-39. The molecular weight is 4570.51.

[0584] Other ICK peptides are provided in the sequence listing. SEQ ID NOs: 534-707 are ICK peptide sequences and include the “kappa”/“omega” toxins and the “hybrid” toxins. SEQ ID NO: 593 is omega-ACTX-Hv1a. SEQ ID NO: 661 is hybrid-ACTX-Hv1a or U-ACTX-Hv1a.

[0585] Section II. The TMOF Motif Peptides or TMOF Peptides.

[0586] “TMOF motif,” or “TMOF proteins” means trypsin modulating oostatic factor peptide. Numerous examples and variants are provided. SEQ ID NO: 708 is the wild type TMOF sequence. Other non-limiting variants are provided in SEQ. ID. NOs: 709-721. Other examples would be known or could be created by one skilled in the art.

[0587] Section III. Bt Proteins

[0588] Bt are the initials for a bacteria called Bacillus thuringiensis. The Bt bacteria produces a family of peptides that are toxic to many insects. The Bt toxic peptides are well known for their ability to produce parasporal crystalline protein inclusions (usually referred to as crystals) that fall under two major classes of toxins; cytolysins (Cyt) and crystal Bt proteins (Cry). Because the cloning and sequencing of the first crystal proteins genes in the early-1980s, may others have been characterized and are now classified according to the nomenclature of Crickmore et al. (1998). Generally Cyt proteins are toxic towards the insect orders Coleoptera (beetles) and Diptera (flies), and Cry proteins target Lepidopterans (moths and butterflies). Cry proteins bind to specific receptors on the membranes of mid-gut (epithelial) cells resulting in rupture of those cells. If a Cry protein cannot find a specific receptor on the epithelial cell to which it can bind, then it is not toxic. Bt strains can have different complements of Cyt and Cry proteins, thus defining their host ranges. The genes encoding many Cry proteins have been identified.

[0589] Currently there are four main pathotypes of insecticidal Bt parasporal peptides based on order specificity: Lepidotera-specific (Cry1, now Cry1), Coleoptera-specific (CryIII, now Cry3), Diptera-specific (CryIV, now Cry4, Cry10, Cry11; and CytA, now Cyt1A), and CryII (Now Cry2), the only family known at that time to have dual (Lepidoptera and Diptera) specificity. Cross-order activity is now apparent in many cases.

[0590] The nomenclature assigns holotype sequences a unique name which incorporates ranks based on the degree of divergence, with the boundaries between the primary (Arabic numeral), secondary (uppercase letter), and tertiary (lower case letter) rank representing approximately 95%, 78% and 45% identities. A fourth rank (another Arabic number) is used to indicate independent isolations of holotype toxin genes with sequences that are identical or differ only slightly. Currently, the nomenclature distinguishes 174 holotype sequences that are grouping in 55 cry and 2 cyt families (Crickmore, N., Zeigler, D. R., Schnepf, E., Van Rie, J., Lereclus, D., Daum, J, Bravo, A., Dean, D. H., B. thuringiensis toxin nomenclature). Any of these crystal proteins and the genes that produce them may be used to produce a suitable Bt related toxin for this invention.

[0591] Also included in the descriptions of this invention are families of highly related crystal proteins produced by other bacteria: Cry16 and Cry17 from Clostridium bifermentans (Barloy et al., 1996, 1998), Cry18 from Bacillus popilliae (Zhang et al., 1997), Cry43 from Paenibacillus lentimorbis (Yokoyama et al., 2004) and the binary Cry48/Cry49 produced by Bacillus sphaericus (Jones et al., 2008). Other crystalline or secreted pesticidal proteins, such as the S-layer proteins (Peña et al., 2006) that are included here are, genetically altered crystal proteins, except those that were modified through single amino acid substitutions (e.g., Lambert et al., 1996). Any of these genes may be used to produce a suitable Bt related toxin for this invention.

[0592] Examples of Bt

[0593] In particular, isolated nucleic acid molecules corresponding to Bt protein nucleic acid sequences are provided. Additionally, amino acid sequences corresponding to the polynucleotides are encompassed. In particular, the present invention provides for an isolated nucleic acid molecule comprising a nucleotide sequence encoding the amino acid sequence shown in US 2009/0099081, published on Apr. 18, 2009, all of which is herein incorporated by reference in its entirety, and all sequences identified by number specifically incorporated by reference. SEQ ID NOs: 9, 11, 13, 15, or 18, or a nucleotide sequence set forth in SEQ ID NOs: 1, 2, 4, 6, 7, 8, 10, 12, 14, 16, or 17, as well as variants and fragments thereof. Nucleotide sequences that are complementary to a nucleotide sequence of the invention, or that hybridize to a sequence of the invention are also encompassed.

[0594] Nucleotide sequences encoding the proteins of the present invention include the sequence set forth in US 2009/0099081, published on Apr. 18, 2009, SEQ ID NOs: 1, 2, 4, 6, 7, 8, 10, 12, 14, 16, or 17, and variants, fragments, and complements thereof. By “complement” is intended a nucleotide sequence that is sufficiently complementary to a given nucleotide sequence such that it can hybridize to the given nucleotide sequence to thereby form a stable duplex. The corresponding amino acid sequence for the Bt protein encoded by this nucleotide sequence are set forth in SEQ ID NOs: 33-533.

[0595] Nucleic acid molecules that are fragments of these Bt protein encoding nucleotide sequences are also encompassed by the present invention (for example, US 2009/0099081, published on Apr. 18, 2009, all of which is herein incorporated by reference in its entirety, and all sequences identified by number specifically incorporated by reference. SEQ ID NO: 8 is a fragment of SEQ ID NOs: 4 and 12; SEQ ID NO: 4 is a fragment of SEQ ID NO: 2). The term “fragment” is intended to mean a portion of the nucleotide sequence encoding a Bt protein. A fragment of a nucleotide sequence may encode a biologically active portion of a Bt protein, or it may be a fragment that can be used as a hybridization probe or PCR primer using methods disclosed below. Nucleic acid molecules that are fragments of a Bt protein nucleotide sequence comprise at least about 50, 100, 200, 300, 400, 500, 600, 700, 800, 900, 1000, 1050, 1100, 1150, 1200, 1250, 1300, 1350, 1400, 1450, 1500, 1550, 1600, 1650, 1700, 1750, 1800, 1850, 1860, 1870, 1880, 1885 contiguous nucleotides, or up to the number of nucleotides present in a full-length Bt-protein encoding nucleotide sequence disclosed herein (for example, 1890 nucleotides for US 2009/0099081, published on Apr. 18, 2009, Here these are provided as SEQ ID NO: 1 and 2, 1806 nucleotides for SEQ ID NO: 4, 1743 nucleotides for SEQ ID NOs: 6, 7, 8, and 16, 1809 nucleotides for SEQ ID NO: 10, and 1752 nucleotides for SEQ ID NOs: 12 and 14, in the sequence listing) depending upon the intended use. By “contiguous” nucleotides is intended nucleotide residues that are immediately adjacent to one another. Fragments of the nucleotide sequences of the present invention will encode protein fragments that retain the biological activity of the Bt protein and, hence, retain pesticidal activity. By “retains activity” is intended that the fragment will have at least about 30%, at least about 50%, at least about 70%, 80%, 90%, 95% or higher of the pesticidal activity of the Bt protein. Methods for measuring pesticidal activity are well known in the art. See, for example, Czapla and Lang (1990) J. Econ. Entomol. 83:2480-2485; Andrews et al. (1988) Biochem. J. 252:199-206; Marrone et al. (1985) J. of Economic Entomology 78:290-293; and U.S. Pat. No. 5,743,477, all of which are herein incorporated by reference in its entirety, and all sequences identified by number specifically incorporated by reference.

[0596] A fragment of a Bt protein encoding nucleotide sequence that encodes a biologically active portion of a protein of the invention will encode at least about 15, 25, 30, 50, 75, 100, 125, 150, 175, 200, 250, 300, 350, 400, 450, 500, 550, 560, 570, 575, 580, 585, 590, 595, 600 contiguous amino acids, or up to the total number of amino acids present in a full-length Bt protein of the invention (for example, 580 amino acids for SEQ ID NO: 41, 602 amino acids for SEQ ID NO: 43, and 583 amino acids for SEQ ID NOs: 45 and 47).

[0597] Preferred Bt protein proteins of the present invention are encoded by a nucleotide sequence sufficiently identical to the nucleotide sequence of US 2009/0099081, published on Apr. 18, 2009, all of which is herein incorporated by reference in its entirety, and all sequences identified by number specifically incorporated by reference, sequences 1, 2, 4, 6, 7, 8, 10, 12, 14, 16, or 17. By “sufficiently identical” is intended an amino acid or nucleotide sequence that has at least about 60% or 65% sequence identity, about 70% or 75% sequence identity, about 80% or 85% sequence identity, about 90%, 91%, 92%, 93%, 94%, 95%, 96%, 97%, 98%, 99% or greater sequence identity compared to a reference sequence using one of the alignment programs described herein using standard parameters. One of skill in the art will recognize that these values can be appropriately adjusted to determine corresponding identity of proteins encoded by two nucleotide sequences by taking into account codon degeneracy, amino acid similarity, reading frame positioning, and the like.

[0598] The invention also encompasses variant nucleic acid molecules (for example, US 2009/0099081, published on Apr. 18, 2009, all of which is herein incorporated by reference in its entirety, and all sequences identified by number specifically incorporated by reference, sequence 2 is a variant of sequences 1; sequence 7 and 8 are variants of sequences 6; sequence 10 is a variant of sequence 4 and 12; and sequence 14 is a variant of sequence 12). “Variants” of the Bt protein encoding nucleotide sequences include those sequences that encode the Bt protein disclosed herein but that differ conservatively because of the degeneracy of the genetic code as well as those that are sufficiently identical as discussed above.

[0599] Naturally occurring allelic variants can be identified with the use of well-known molecular biology techniques, such as polymerase chain reaction (PCR) and hybridization techniques as outlined below. Variant nucleotide sequences also include synthetically derived nucleotide sequences that have been generated, for example, by using site-directed mutagenesis but which still encode the Bt protein proteins disclosed in the present invention as discussed below. Variant proteins encompassed by the present invention are biologically active, that is they continue to possess the desired biological activity of the native protein, i.e., retaining pesticidal activity. By “retains activity” is intended that the variant will have at least about 30%, at least about 50%, at least about 70%, or at least about 80% of the pesticidal activity of the native protein. Methods for measuring pesticidal activity are well known in the art. See, for example, Czapla and Lang (1990) J. Econ. Entomol. 83: 2480-2485; Andrews et al. (1988) Biochem. J. 252:199-206; Marrone et al. (1985) J. of Economic Entomology 78:290-293; and U.S. Pat. No. 5,743,477, all of which are herein incorporated by reference in their entirety, and all sequences identified by number specifically incorporated by reference.

[0600] Examples of the Generation of Synthetic and Variant Bt Genes

[0601] In one aspect of the invention, synthetic axmi-004 sequences were generated, for example synaxmi-004 US 2009/0099081, published on Apr. 18, 2009, all of which is herein incorporated by reference in its entirety, and all sequences identified by number specifically incorporated by reference, (sequence 1) and synaxmi-004B (sequence 2). These synthetic sequences have an altered DNA sequence relative to the axmi-004 sequence (sequence 3) recited in U.S. Pat. No. 7,355,099, all of which is herein incorporated by reference in its entirety, and all sequences identified by number specifically incorporated by reference), and encode the original AXMI-004 protein. Likewise, synaxmi-004B-2M (sequence 4) was designated and encodes the axmi-004 alternate start site (herein referred to as axmi-004B-2M and set forth in sequence 5) originally identified in U.S. patent application Ser. No. 10/782,020.

[0602] In another aspect of the invention, a third start site was identified in the axmi-004 coding sequence. This coding region is designated axmi-004B-3M (US 2009/0099081, published on Apr. 18, 2009, all of which is herein incorporated by reference in its entirety, and all sequences identified by number specifically incorporated by reference, sequence 16) and encodes the AXMI-004B-3M amino acid sequence set forth in sequence 9. Synthetic sequences encoding the AXMI-004B-3M protein were also designated. These synthetic nucleotide sequences were designated synaxmi-004B-3M, synaxmi-004C-3M, and synaxmi-004D-3M and are set forth in sequences 6, 7, and 8, respectively. In another aspect of the invention, modified versions of the nucleotide sequence encoding AXMI-004B-3M protein were designed such that additional N-terminal residues are added to the encoded protein. These sequence are designated synaxmi-004B-3M-alt1 (US 2009/0099081, published on Apr. 18, 2009, sequence 10), synaxmi-004B-3M-alt2 (sequence 12), synaxmi-004B-3M-alt3 (sequence 14), and synaxmi-004B-3M-alt4 (sequence 17). The encoded proteins are designated AXMI-004B-3M-ALT1 (sequence 11), AXMI-004B-3M-ALT2 (sequence 13), AXMI-004B-3M-ALT3 (sequence 15), and AXMI-004B-3M-ALT4 (sequence 18).

[0603] Other Bt proteins and gene descriptions can be found in the following. Each and every patent publication referred to below with a note as to the Bt toxin to which the publication refers to, is hereby incorporated by reference in its entirely. These documents have also published and they and their sequences are in the public domain.

[0604] More Examples of Bt genes, proteins, and the patent documents that describe them are found in Tables 4, 5, and 6 below. The patent documents in Tables 4, 5, 6, in particular the US patents and US applications, are hereby incorporated by reference in their entirety.

TABLE 4
Bt Toxins

| Toxin | Patents or Patent Publication Number |
|---|---|
| Cry1 | U.S. 2003046726, U.S. Pat. No. 6,833,449, |
| | CN1260397, U.S. 201026939, |
| | U.S. 2006174372, U.S. 2006174372, |
| | U.S. 642241, U.S. Pat. No. 6,229,004, |
| | U.S. 2004194165, U.S. Pat. No. 6,573,240, |
| | U.S. Pat. No. 5,424,409, U.S. Pat. No. 5,407,825, |
| | U.S. Pat. No. 5,135,867, U.S. Pat. No. 5,055,294, |
| Cry1 | WO2007107302, U.S. Pat. No. 6,855,873, |
| | WO2004020636, U.S. 2007061919, |
| | U.S. Pat. No. 6,048,839, U.S. 2007061919, |
| | AU784649B, U.S. 2007061919, U.S. Pat. No. 6,150,589, |
| | U.S. Pat. No. 5,679,343, U.S. Pat. No. 5,616,319, |
| | U.S. Pat. No. 5,322,687, |
| Cry1 | WO2007107302, U.S. 2006174372, |
| | U.S. 2005091714, U.S. 2004058860, |
| | U.S. 2008020968, U.S. Pat. No. 6,043,415, |
| | U.S. Pat. No. 5,942,664, |
| Cry1 | WO2007107302, U.S. 2007061919, |
| | U.S. Pat. No. 6,172,281, |
| Cry1 | WO03082910, MX9606262, U.S. Pat. No. 5,530,195, |
| | U.S. Pat. No. 5,407,825, U.S. Pat. No. 5,045,469, |
| Cry1 | U.S. 2006174372, |
| Cry1 | U.S. 2007061919, |
| Cry1 | U.S. 2007061919, |
| Cry1 | U.S. 2007061919, CN1401772, U.S. Pat. No. 6,063,605, |
| Cry1 | U.S. 2007061919, AU784649B, U.S. Pat. No. 5,723,758, |
| | U.S. Pat. No. 5,616,319, U.S. Pat. No. 5,356,623, |
| | U.S. Pat. No. 5,322,687 |
| Cry1 | U.S. Pat. No. 5,723,758 |
| Cry2 | CN1942582, WO9840490, |
| | U.S. 2007061919, UA75570, |
| | MXPA03006130, U.S. 2003167517, |
| | U.S. Pat. No. 6,107,278, U.S. Pat. No. 6,096,708, |
| | U.S. Pat. No. 5,073,632, U.S. Pat. No. 7,208,474, |
| | U.S. Pat. No. 7,244,880, |
| Cry3 | U.S. 2002152496, RU2278161, |
| | U.S. 2003054391, |
| Cry3 | U.S. Pat. No. 5,837,237, U.S. Pat. No. 5,723,756, |
| | U.S. Pat. No. 5,683,691, U.S. Pat. No. 5,104,974, |
| | U.S. Pat. No. 4,996,155, |
| Cry3 | U.S. Pat. No. 5,837,237, U.S. Pat. No. 5,723,756, |
| Cry5 | WO9840491, U.S. 2004018982, U.S. Pat. No. 6,166,195, |
| | U.S. 2001010932, U.S. Pat. No. 5,985,831, |
| | U.S. Pat. No. 5,824,792, U.S. 528153 |
| Cry5 | WO2007062064, U.S. 2001010932, |
| | U.S. Pat. No. 5,824,792, |
| Cry6 | WO2007062064, U.S. 2004018982, |
| | U.S. Pat. No. 5,973,231, U.S. Pat. No. 5,874,288, |
| | U.S. Pat. No. 5,236,843, U.S. 683106 |
| Cry6 | U.S. 2004018982, U.S. Pat. No. 6,166,195, |
| Cry7 | U.S. Pat. No. 6,048,839, U.S. Pat. No. 5,683,691, |
| | U.S. Pat. No. 5,378,625, U.S. 518709 |
| Cry7 | CN195215 |
| Cry8 | |
| Cry8 | |
| Cry8 | U.S. 200301796 |
| Cry8 | WO2006053473, U.S. 2007245430, |
| Cry8 | WO200605347 |
| Cry9 | U.S. 2007061919, |
| Cry9 | WO200506620 |
| Cry9 | U.S. 2007061919, U.S. Pat. No. 6,448,226, |
| | U.S. 2005097635, WO2005066202, |
| | U.S. Pat. No. 6,143,550, U.S. Pat. No. 6,028,246, |
| | U.S. Pat. No. 6,727,409, |
| Cry9 | U.S. 2005097635, WO2005066202, |
| Cry9 | U.S. Pat. No. 6,570,005, |
| Cry9 | AU784649B, U.S. 2007074308, |
| | U.S. 736180 |
| Cry11 | MXPA0200870 |
| Cry12 | U.S. 2004018982, U.S. Pat. No. 6,166,195, |
| | U.S. Pat. No. 6,077,937, U.S. Pat. No. 5,824,792, |
| | U.S. Pat. No. 5,753,492, |
| Cry13 | U.S. 2004018982, U.S. 6,166,195, |
| | U.S. Pat. No. 6,077,937, U.S. Pat. No. 5,824,792, |
| | U.S. Pat. No. 5,753,492, |
| Cry14 | JP2007006895, U.S. Pat. No. 5,831,011, |
| Cry21 | U.S. Pat. No. 5,831,011, U.S. Pat. No. 5,670,365, |
| Cry22 | U.S. 2006218666, U.S. 2001010932, |
| | MXPA01004361, U.S. Pat. No. 5,824,792, |
| Cry22 | U.S. 2003229919, |
| Cry23 | U.S. 2006051822, U.S. 2003144192, |
| | UA75317, U.S. Pat. No. 6,399,330, |
| | U.S. Pat. No. 6,326,351, U.S. Pat. No. 6,949,626, |
| Cry26 | U.S. 200315001 |
| Cry28 | U.S. 200315001 |
| Cry31 | CA2410153, |
| Cry34 | U.S. 200316752 |
| Cry35 | U.S. 2003167522, |
| Cry37 | U.S. 2006051822, U.S. 2003144192, |
| | UA75317, U.S. 6,399,330, U.S. 6,326,351, |
| | U.S. Pat. No. 6,949,626, |
| Cry43 | U.S. 200527164 |
| Cyt1 | WO2007027776, |
| Cyt1 | U.S. 6150165, |
| Cyt2 | U.S. 2007163000, EP1681351, |
| | U.S. Pat. No. 6,686,452, U.S. Pat. No. 6,537,756, |

TABLE 5
Hybrid Insecticidal Crystal Proteins and Patents.

| Patents^{a} | Holotype Toxin^{b} |
|---|---|
| U.S. 2008020967 | Cry29Aa |
| U.S. 2008040827 | Cry1Ca |
| U.S. 2007245430 | Cry8Aa |
| U.S. 2008016596 | Cry8Aa |
| U.S. 2008020968 | Cry1Cb |

TABLE 6
Patents Relating to Other Hybrid Insecticidal Crystal Proteins

| Source toxins^{a} | Patents^{b} |
|---|---|
| Cry1A, Cry1C | U.S. Pat. No. 5,593,881, U.S. Pat. No. 5,932,209 |
| Cry1C, Cry1A, Cry1F | U.S. Pat. No. 6,962,705, U.S. Pat. No. 7,250,501, |
| | U. S. 2004093637, WO0114562, WO0214517, |
| | U.S. Pat. No. 6,156,573 |
| Cry23A, Cry37A | U.S. Pat. No. 7,214,788 |
| Cry1A | U.S. Pat. No. 7,019,197 |
| Cry1A, Cry1B | U.S. Pat. No. 6,320,100 |
| Cry1A, Cry1C | AU2001285900B |
| Cry23A, Cry37A | U.S. 2007208168 |
| Cry3A, Cry1I, Cry1B | WO0134811 |
| Cry3A, Cry3B, Cry3C | U.S. 2004033523 |
| Cry1A, Cry1C, Cry1E, | U.S. Pat. No. 6,780,408 |
| Cry1G | |
| Cry1A, Cry1F | U.S. 2008047034 |

[0605] The sequence listing includes Bt sequences SEQ. ID. NOs: 33-533. These sequences include examples of Bt protein Cry and Cyt protein sequences. Examples are numerous and one skilled in the art would know of many other examples of various Bt sequences that are suitable substitutes for those in this disclosure.

[0606] Section IV. Pesticide Compositions and Increasing Plant Yields

[0607] The active ingredients of the present invention are normally applied in the form of compositions and can be applied to the crop area or plant to be treated, simultaneously or in succession, with other compounds. These compounds can be fertilizers, weed killers, cryoprotectants, surfactants, detergents, pesticidal soaps, dormant oils, polymers, and/or time-release or biodegradable carrier formulations that permit long-term dosing of a target area following a single application of the formulation. They can also be selective herbicides, chemical insecticides, virucides, microbicides, amoebicides, pesticides, fungicides, bacteriocides, nematocides, molluscicides or mixtures of several of these preparations, if desired, together with further agriculturally acceptable carriers, surfactants or application-promoting adjuvants customarily employed in the art of formulation. Suitable carriers and adjuvants can be solid or liquid and correspond to the substances ordinarily employed in formulation technology, e.g. natural or regenerated mineral substances, solvents, dispersants, wetting agents, tackifiers, binders or fertilizers. Likewise the formulations may be prepared into edible “baits” or fashioned into pest “traps” to permit feeding or ingestion by a target pest of the pesticidal formulation.

[0608] Methods of applying an active ingredient of the present invention or an agrochemical composition of the present invention that contains at least one of the pesticidal proteins produced by the bacterial strains of the present invention include leaf application, seed coating and soil application. The number of applications and the rate of application depend on the intensity of infestation by the corresponding pest.

[0609] The composition may be formulated as a powder, dust, pellet, granule, spray, emulsion, colloid, solution, or such like, and may be prepared by such conventional means as desiccation, lyophilization, homogenation, extraction, filtration, centrifugation, sedimentation, or concentration of a culture of cells comprising the polypeptide. In all such compositions that contain at least one such pesticidal polypeptide, the polypeptide may be present in a concentration of from about 1% to about 99% by weight.

[0610] Lepidopteran or coleopteran pests may be killed or reduced in numbers in a given area by the methods of the invention, or may be prophylactically applied to an environmental area to prevent infestation by a susceptible pest. Preferably the pest ingests, or is contacted with, a pesticidally-effective amount of the polypeptide. By “pesticidally-effective amount” is intended an amount of the pesticide that is able to bring about death to at least one pest, or to noticeably reduce pest growth, feeding, or normal physiological development. This amount will vary depending on such factors as, for example, the specific target pests to be controlled, the specific environment, location, plant, crop, or agricultural site to be treated, the environmental conditions, and the method, rate, concentration, stability, and quantity of application of the pesticidally-effective polypeptide composition. The formulations may also vary with respect to climatic conditions, environmental considerations, and/or frequency of application and/or severity of pest infestation.

[0611] The pesticide compositions described may be made by formulating either the bacterial cell, crystal and/or spore suspension, or isolated protein component with the desired agriculturally-acceptable carrier. The compositions may be formulated prior to administration in an appropriate means such as lyophilized, freeze-dried, desiccated, or in an aqueous carrier, medium or suitable diluent, such as saline or other buffer. The formulated compositions may be in the form of a dust or granular material, or a suspension in oil (vegetable or mineral), or water or oil/water emulsions, or as a wettable powder, or in combination with any other carrier material suitable for agricultural application. Suitable agricultural carriers can be solid or liquid and are well known in the art. The term “agriculturally-acceptable carrier” covers all adjuvants, inert components, dispersants, surfactants, tackifiers, binders, etc. that are ordinarily used in pesticide formulation technology; these are well known to those skilled in pesticide formulation. The formulations may be mixed with one or more solid or liquid adjuvants and prepared by various means, e.g., by homogeneously mixing, blending and/or grinding the pesticidal composition with suitable adjuvants using conventional formulation techniques. Suitable formulations and application methods are described in U.S. Pat. No. 6,468,523, herein incorporated by reference.

[0612] Methods for Increasing Plant Yield

[0613] Methods for increasing plant yield are provided. The methods comprise introducing into a plant or plant cell a polynucleotide comprising a pesticidal sequence disclosed herein. As defined herein, the “yield” of the plant refers to the quality and/or quantity of biomass produced by the plant. By “biomass” is intended any measured plant product. An increase in biomass production is any improvement in the yield of the measured plant product. Increasing plant yield has several commercial applications. For example, increasing plant leaf biomass may increase the yield of leafy vegetables for human or animal consumption. Additionally, increasing leaf biomass can be used to increase production of plant-derived pharmaceutical or industrial products. An increase in yield can comprise any statistically significant increase including, but not limited to, at least a 1% increase, at least a 3% increase, at least a 5% increase, at least a 10% increase, at least a 20% increase, at least a 30%, at least a 50%, at least a 70%, at least a 100% or a greater increase in yield compared to a plant not expressing the pesticidal sequence.

[0614] In specific methods, plant yield is increased as a result of improved pest resistance of a plant expressing a pesticidal protein disclosed herein. Expression of the pesticidal protein results in a reduced ability of a pest to infest or feed on the plant, thus improving plant yield.

[0615] Section V. Plant Transformations

[0616] Any combination of the principal components ICK motif protein and or TMOF motif protein and Bt protein, can be combined in a PIP. We also disclose the addition of ERSP (Endoplasmic Reticulum Signal Peptide) and a translational stabilizing protein and intervening linker in order to create a superior PIP (Plant-incorporated protectant) and expressed as a PEP (Plant Expressed Peptide) as long as a minimum of both Bt and ICK motif protein are used, it is preferred to use these two peptides in combination with ERSP. TMOF motif can also be used with or replacing the ICK motif. These compositions can be created, used as a PEP and expressed as a PIP.

[0617] We describe methods to increase the efficacy of the plant expression, to increase the accumulation of plant expressed proteins and to dramatically increase the insecticidal activity of plant expressed proteins. We describe targeting of the ICK motif protein to the Endoplasmic Reticulum (ER) by an Endoplasmic Reticulum Signaling Protein (ERSP) in plants, in order to provide for the correct covalent cross-linking of peptide disulfide bridges which generate the essential tertiary ICK motif structure required for insecticidal activity. We further describe targeting of the ICK motif protein to the ER by an ERSP in plants, with a translational stabilizing protein domain added in order to increase the size of the resulting ICK fusion protein which enhances peptide accumulation in the plant. We further describe targeting of the ICK motif protein to the ER by an ERSP in plants, with a translation stabilizing protein added as above, and with an intervening peptide sequence added, the latter of which allows for potential cleavage and the recovery of the active form of the ICK motif protein having insecticidal activity.

[0618] This invention describes the ICK motif proteins with insecticidal activity that are plant expressed and which can successfully protect a plant or crop from insect damage. The methods taught herein will enable peptides to not only be expressed in a plant but to be expressed and folded properly, so that they retain their insecticidal activity even after expression in the plant

[0619] We describe how the open reading frame (ORF) of a target peptide, such as an ICK motif peptide, must be modified in order for the desired biological activity to remain after plant expression of the ICK motif peptide. In one embodiment we describe a Plant Incorporated Protectant, or PIP, that expresses an active insecticidal protein. The PIP insecticidal protein is comprised of an Endoplasmic Reticulum Signal Peptide (ERSP) operably linked to a Cysteine Rich Insecticidal Peptide (CRIP) or Inhibitor Cystine knot (ICK) motif protein, wherein the ERSP is the N-terminal of the linked ERSP+ICK motif protein. The PIP insecticidal protein is then incorporated into a plant of choice to give insect resistance to the plant. The plant cells will express and accumulate the properly folded ICK motif insecticidal protein. When an insect consumes the plant cells, the properly folded ICK motif insecticidal protein will be delivered inside the insect where it will have insecticidal activity and cause the insect either to slow or to stop its feeding, slow its movements, and slow or stop reproduction, all of which provides protection for the plant from insect damage.

[0620] We describe transient expression systems to express various plant expression cassettes. One expressed transgene we use is Green Fluorescent Protein or GFP, which is detectable visually when excited by UV light. The GFP transient expression system we used for the evaluation of plant transgenic proteins is for all practical purposes—equivalent to use of a stable transgenic plant system for these types of evaluations.

[0621] The CRIP, ICK, TMOF, Sea Anemone Motif can be Linked to the ERSP.

[0622] For the ICK motif insecticidal protein to be properly folded when it is expressed from a transgenic plant, it must have an ERSP fused in frame with the ICK motif insecticidal protein. This can also be done with a TMOF motif. This can be accomplished in several ways. See FIGS. 1, 2 and 3. The protein should be routed through the ER where the correct covalent bond connections for proper disulfide bond formation are formed. Without wishing to be bound by theory, we believe the ER routing results in the correct tertiary structure of the ICK motif protein. It is commonly postulated that such routing is achieved by a cellular component called a signal-recognition particle: the signal-recognition particle binds to the ribosome translating the protein, it pauses translation, and it transports the ribosome/mRNA complex to a translocator pore in the ER, where the ribosome then continues the translation and threads the resulting protein into the ER. Within the ER the ERSP is cleaved and the protein is acted upon by posttranslational modification processes in the ER. Once such process involves protein disulfide isomerases, a class of proteins that catalyze the formation of disulfide bonds. Without any additional retention protein signals, the protein is transported through the ER to the golgi apparatus, where it is finally secreted outside the plasma membrane and into the apoplastic space. Without wishing to be bound by theory, we think proteins, such as insecticidal proteins, that have an ICK motif, need to be routed through the ER, in order for the proteins to have correct disulfide bond formation, if they are expressed in plants.

[0623] The ERSP (Endoplasmic Reticulum Signaling Protein).

[0624] In addition to the text below, see Part I-1 (The EERSP or ersp component of the PEPs.

[0625] The ERSP is the N-terminal region of the ERSP+ICK motif protein complex and the ERSP portion is composed of about 3 to 60 amino acids. In some embodiments it is 5 to 50 amino acids. In some embodiments it is 10 to 40 amino acids but most often is composed of 15 to 20; 20 to 25; or 25 to 30 amino acids. The ERSP is a signal peptide so called because it directs the transport of a protein. Signal peptides may also be called targeting signals, signal sequences, transit peptides, or localization signals. The signal peptides for ER targeting are often 15 to 30 amino acid residues in length and have a tripartite organization, comprised of a core of hydrophobic residues flanked by a positively charged aminoterminal and a polar, but uncharged carboxyterminal region. See Zimmermann, Richard; Eyrisch, Susanne; Ahmad, Mazen and Helms, Volkhard: “Protein translocation across the ER membrane” Biochimica et Biohysica Acta 1808 (2011) 912-924, Elsevier.

[0626] About half and often more of the ERSP is usually comprised of hydrophobic amino acids, but the percentage of amino acids in an ERSP that are hydrophobic can vary. Without wishing to be bound by any theory of how the invention works, we think the hydrophobic amino acids stick in the membrane of the ER after translation and this allows the signal peptide peptidase to cleave the ERSP off of the translated protein, releasing the ICK motif protein into the ER. Many ERSPs are known. Many plant ERSPs are known. It is NOT required that the ERSP be derived from a plant ERSP, non-plant ERSPs will work with the procedures described herein. Many plant ERSPs are however well known and we describe some plant derived ERSPs here. BAAS, for example, is derived from the plant, Hordeum vulgare.

[0627] One example of a ERSP used here is BAAS, the sequence of BAAS is MANKH LSLSL FLVLL GLSAS LASG (SEQ ID NO: 1035, one letter code)

[0628] This peptide, named “BAAS” is cleaved from the ICK motif upon the protein's translation into the ER. The molecular weight is 2442.94 Daltons. FIGS. 1-3 show a representation of an ICK motif protein linked to an ERSP. These figures could equally represent a TMOF motif protein linked to an ERSP.

[0629] Plant ERSPs, which are selected from the genomic sequence for proteins that are known to be expressed and released into the apoplastic space of plants, and a few examples are BAAS, carrot extensin, tobacco PR1. The following references provide further descriptions, and are incorporated by reference herein in their entirety. De Loose, M. et al. “The extension signal peptide allows secretion of a heterologous protein from protoplasts” Gene, 99 (1991) 95-100. De Loose, M. et al. described the structural analysis of an extensin-encoding gene from Nicotiana plumbaginifolia, the sequence of which contains a typical signal peptide for translocation of the protein to the endoplasmic reticulum. Chen, M. H. et al. “Signal peptide-dependent targeting of a rice alpha-amylase and cargo proteins to plastids and extracellular compartments of plant cells” Plant Physiology, 2004 July; 135(3): 1367-77. Epub 2004 Jul. 2. Chen, M. H. et al. studied the subcellular localization of α-amylases in plant cells by analyzing the expression of α-amylase, with and without its signal peptide, in transgenic tobacco. These references and others teach and disclose translational stabilizing proteins that can be used in the methods, procedures and peptide, protein and nucleotide complexes and constructs described herein.

[0630] The Translational Stabilizing Protein.

[0631] In addition to the text below, see Part I-III (The translational stabilizing protein component, STA or sta.

[0632] The procedures described above refer to providing a ERSP+CRIP where ERSP+CRIP could be ERSP+ICK, ERSP+Non-ICK, ERSP+Av (SEA ANOMONE) or the procedures could refer to ERSP+TMOF, or they could refer to ERSP+CRIP and a TMOF sufficient to make a plant produce properly folded peptides. We also suggest that in order to more fully protect a plant from some insects, more than just proper folding is sometimes needed. With a properly constructed expression cassette, a plant can be induced to make and accumulate even greater amounts of toxic peptide. When a plant accumulates greater amounts of properly folded toxic CRIP or TMOF peptides it can more easily resist or kill the insects that attack and eat the plants. One way to increase the insecticidal activity of the PIP is with translational stabilizing proteins. The translational stabilizing protein can be used to significantly increase the accumulation of the toxic peptide in the plant and thus the potency of the PIP, especially when the PIP has a translational stabilizing protein of its own. The procedures described herein can provide for the accumulation in the plant of large amounts of the now properly folded transgenic plant proteins. Transgenic plants expressing both an ICK motif insecticidal protein and a translational stabilizing protein, demonstrate dramatically improved accumulation of toxic ICK peptides over systems without a translational stabilizing protein. Representative PIPs with a translational stabilizing protein are described herein.

[0633] Experiments comparing plant expressed peptides both with and without a translational stabilizing protein show dramatic differences. The protein expression of an ICK-motif protein without a translational stabilizing protein can be very low. When a translational stabilizing protein is fused to the ICK-motif protein, there are higher levels of detectable accumulation. The translational stabilizing protein can be a domain of another protein or it can comprise an entire protein sequence. The translational stabilizing protein is a protein with sufficient tertiary structure that it can accumulate in a cell without being targeted by the cellular process of protein degradation. The protein can be between 5 and 50 amino acids (e.g., another ICK-motif protein), 50 to 250 amino acids (GNA), 250 to 750 amino acids (e.g., chitinase) and 750 to 1500 amino acids (e.g., enhancin).

[0634] The translational stabilizing protein, (or protein domain) can contain proteins that have no useful characteristics other than translation stabilization, or they can have other useful traits in addition to translational stabilization. One embodiment of the translation stabilization protein can be multiple ICK-motif proteins in tandem. Useful traits can include: additional insecticidal activity, such as activity that is destructive to the peritrophic membrane, activity that is destructive to the gut wall, and/or activity that actively transports the ICK motif protein across the gut wall. One embodiment of the translational stabilizing protein can be a polymer of fusions proteins involving ICK motif proteins. One embodiment of the translational stabilizing protein can be a polymer of fusions proteins involving TMOF motif proteins. A specific example of a translational stabilizing protein is provided here to illustrate the use of a translational stabilizing protein. The example is not intended to limit the disclosure or claims in any way. Useful translational stabilizing proteins are well known in the art, and any proteins of this type could be used as disclosed herein. Procedures for evaluating and testing production of peptides are both known in the art and described herein. One example of one translational stabilizing protein is SEQ ID NO: 1036, one letter code, as follows:

(one letter code).
SEQ ID NO: 1036
ASKGE ELFTG VVPIL VELDG DVNGH KFSVS GEGEG DATYG
KLTLK FICTT GKLPV PWPTL VTTFS YGVQC FSRYP DHMKR
HDFFK SAMPE GYVQE RTISF KDDGN YKTRA EVKFE GDTLV
NRIEL KGIDF KEDGN ILGHK LEYNY NSHNV YITAD KQKNG
IKANF KIRHN IEDGS VQLAD HYQQN TPIGD GPVLL PDNHY
LSTQS ALSKD PNEKR DHMVL LEFVT AAGIT HGMDE LYK

[0635] SEQ ID NO: 1036 is Named “GFP.” The molecular weight is 26736.02 Daltons.

[0636] Additional examples of translational stabilizing proteins can be found in the following references, incorporated by reference in their entirety: Kramer, K. J. et al. “Sequence of a cDNA and expression of the gene encoding epidermal and gut chitinases of Manduca sexta” Insect Biochemistry and Molecular Biology, Vol. 23, Issue 6, September 1993, pp. 691-701. Kramer, K. J. et al. isolated and sequenced a chitinase-encoding cDNA from the tobacco hornworm, Manduca sexta. Hashimoto, Y. et al. “Location and nucleotide sequence of the gene encoding the viral enhancing factor of the Trichoplusia ni granulosis virus” Journal of General Virology, (1991), 72, 2645-2651. Hashimoto, Y. et al. cloned the gene encoding the viral enhancing factor of a Trichoplusia ni granulosis virus and determined the complete nucleotide sequence. Van Damme, E. J. M. et al. “Biosynthesis, primary structure and molecular cloning of snowdrop (Galanthus nivalis L.) lectin” European Journal of Biochemistry, 202, 23-30 (1991). Van Damme, E. J. M. et al. isolated Poly(A)-rich RNA from ripening ovaries of snowdrop lectin, yielding a single 17-kDa lectin polypeptide upon translation in a wheat-germ cell-free system. These references and others teach and disclose translational stabilizing proteins that can be used in the methods, procedures and peptide, protein and nucleotide complexes and constructs described herein.

[0637] The Intervening Linker

[0638] In addition to the text below, see Part I-IV (The Intervening Linker Peptide component, LINKER, linker, L or if polynucleotide; linker or 1 of the PEPs

[0639] This invention also incorporates an intervening linker between ICK motif protein and the translational stabilizing protein. The intervening linker is between 1 and 30 amino acids. It can have either no cleavage sites or a protease cleavage site specific to serine-, threonine-, cysteine-, and aspartate proteases or metalloproteases. The cleavable linker can be the point of digestion by proteases found in the lepidopteran gut environment and/or the lepidopteran hemolymph environment. An example of the additional component to illustrate this invention is listed below, but it is not limited to this example.

[0640] The example for an intervening linker is IGER (SEQ ID NO: 1037)

[0641] Named “IGER” The molecular weight of this intervening linker is 473.53 Daltons.

[0642] Other examples of intervening linkers can be found in the following references, which are incorporated by reference herein in their entirety: A comparison of the folding behavior of green fluorescent proteins through six different linkers is explored in Chang, H. C. et al. “De novo folding of GFP fusion proteins: high efficiency in eukaryotes but not in bacteria” Journal of Molecular Biology, 2005 Oct. 21; 353(2): 397-409. An isoform of the human GalNAc-Ts family, GalNAc-T2, was shown to retain its localization and functionality upon expression in N. benthamiana plants by Daskalova, S. M. et al. “Engineering of N. benthamiana L. plants for production of N-acetylgalactosamine-glycosylated proteins” BMC Biotechnology, 2010 Aug. 24; 10: 62. The ability of endogenous plastid proteins to travel through stromules was shown in Kwok, E. Y. et al. “GFP-labelled Rubisco and aspartate aminotransferase are present in plastid stromules and traffic between plastids” Journal of Experimental Botany, 2004 March; 55(397): 595-604. Epub 2004 Jan. 30. A report on the engineering of the surface of the tobacco mosaic virus (TMV), virion, with a mosquito decapeptide hormone, trypsin-modulating oostatic factor (TMOF) was made by Borovsky, D. et al. “Expression of Aedes trypsin-modulating oostatic factor on the virion of TMV: A potential larvicide” Proc Natl Acad Sci, 2006 Dec. 12; 103(50): 18963-18968. These references and others teach and disclose translational stabilizing proteins that can be used in the methods, procedures and peptide, protein and nucleotide complexes and constructs described herein.

[0643] Other Plant Transformations are More Well Known.

[0644] Methods of the invention involve introducing a nucleotide construct into a plant. By “introducing” is intended to present to the plant the nucleotide construct in such a manner that the construct gains access to the interior of a cell of the plant. The methods of the invention do not require that a particular method for introducing a nucleotide construct to a plant is used, only that the nucleotide construct gains access to the interior of at least one cell of the plant. Methods for introducing nucleotide constructs into plants are known in the art including, but not limited to, stable transformation methods, transient transformation methods, and virus-mediated methods.

[0645] By “plant” is intended whole plants, plant organs (e.g., leaves, stems, roots, etc.), seeds, plant cells, propagules, embryos and progeny of the same. Plant cells can be differentiated or undifferentiated (e.g. callus, suspension culture cells, protoplasts, leaf cells, root cells, phloem cells, and/or pollen).

[0646] “Transgenic plants” or “transformed plants” or “stably transformed” plants or cells or tissues refers to plants that have incorporated or integrated exogenous nucleic acid sequences or DNA fragments into the plant cell. These nucleic acid sequences include those that are exogenous, or not present in the untransformed plant cell, as well as those that may be endogenous, or present in the untransformed plant cell. “Heterologous” generally refers to the nucleic acid sequences that are not endogenous to the cell or part of the native genome in which they are present, and have been added to the cell by infection, transfection, microinjection, electroporation, microprojection, or the like.

[0647] Transformation of plant cells can be accomplished by one of several techniques known in the art. The Bt-protein gene of the invention may be modified to obtain or enhance expression in plant cells. Typically a construct that expresses such a protein would contain a promoter to drive transcription of the gene, as well as a 3′ untranslated region to allow transcription termination and polyadenylation. The organization of such constructs is well known in the art. In some instances, it may be useful to engineer the gene such that the resulting peptide is secreted, or otherwise targeted within the plant cell. For example, the gene can be engineered to contain a signal peptide to facilitate transfer of the peptide to the endoplasmic reticulum. It may also be preferable to engineer the plant expression cassette to contain an intron, such that mRNA processing of the intron is required for expression.

[0648] Typically this “plant expression cassette” will be inserted into a “plant transformation vector”. This plant transformation vector may be comprised of one or more DNA vectors needed for achieving plant transformation. For example, it is a common practice in the art to utilize plant transformation vectors that are comprised of more than one contiguous DNA segment. These vectors are often referred to in the art as “binary vectors”. Binary vectors as well as vectors with helper plasmids are most often used for Agrobacterium-mediated transformation, where the size and complexity of DNA segments needed to achieve efficient transformation is quite large, and it is advantageous to separate functions onto separate DNA molecules. Binary vectors typically contain a plasmid vector that contains the cis-acting sequences required for T-DNA transfer (such as left border and right border), a selectable marker that is engineered to be capable of expression in a plant cell, and a “gene of interest” (a gene engineered to be capable of expression in a plant cell for which generation of transgenic plants is desired). Also present on this plasmid vector are sequences required for bacterial replication. The cis-acting sequences are arranged in a fashion to allow efficient transfer into plant cells and expression therein. For example, the selectable marker gene and the Bt-protein are located between the left and right borders. Often a second plasmid vector contains the trans-acting factors that mediate T-DNA transfer from Agrobacterium to plant cells. This plasmid often contains the virulence functions (Vir genes) that allow infection of plant cells by Agrobacterium, and transfer of DNA by cleavage at border sequences and vir-mediated DNA transfer, as is understood in the art (Hellens and Mullineaux (2000) Trends in Plant Science 5:446-451). Several types of Agrobacterium strains (e.g. LBA4404, GV3101, EHA101, EHA105, etc.) can be used for plant transformation. The second plasmid vector is not necessary for transforming the plants by other methods such as microprojection, microinjection, electroporation, polyethylene glycol, etc.

[0649] In general, plant transformation methods involve transferring heterologous DNA into target plant cells (e.g. immature or mature embryos, suspension cultures, undifferentiated callus, protoplasts, etc.), followed by applying a maximum threshold level of appropriate selection (depending on the selectable marker gene) to recover the transformed plant cells from a group of untransformed cell mass. Explants are typically transferred to a fresh supply of the same medium and cultured routinely. Subsequently, the transformed cells are differentiated into shoots after placing on regeneration medium supplemented with a maximum threshold level of selecting agent. The shoots are then transferred to a selective rooting medium for recovering rooted shoot or plantlet. The transgenic plantlet then grows into a mature plant and produces fertile seeds (e.g. Hiei et al. (1994) The Plant Journal 6:271-282; Ishida et al. (1996) Nature Biotechnology 14:745-750). Explants are typically transferred to a fresh supply of the same medium and cultured routinely. A general description of the techniques and methods for generating transgenic plants are found in Ayres and Park (1994) Critical Reviews in Plant Science 13:219-239 and Bommineni and Jauhar (1997) Maydica 42:107-120. Since the transformed material contains many cells; both transformed and non-transformed cells are present in any piece of subjected target callus or tissue or group of cells. The ability to kill non-transformed cells and allow transformed cells to proliferate results in transformed plant cultures. Often, the ability to remove non-transformed cells is a limitation to rapid recovery of transformed plant cells and successful generation of transgenic plants.

[0650] Transformation protocols as well as protocols for introducing nucleotide sequences into plants may vary depending on the type of plant or plant cell, i.e., monocot or dicot, targeted for transformation. Generation of transgenic plants may be performed by one of several methods, including, but not limited to, microinjection, electroporation, direct gene transfer, introduction of heterologous DNA by Agrobacterium into plant cells (Agrobacterium-mediated transformation), bombardment of plant cells with heterologous foreign DNA adhered to particles, ballistic particle acceleration, aerosol beam transformation (U.S. Published Application No. 20010026941; U.S. Pat. No. 4,945,050; International Publication No. WO 91/00915; U.S. Published Application No. 2002015066), Lecl transformation, and various other non-particle direct-mediated methods to transfer DNA.

[0651] Methods for transformation of chloroplasts are known in the art. See, for example, Svab et al. (1990) Proc. Natl. Acad. Sci. USA 87:8526-8530; Svab and Maliga (1993) Proc. Natl. Acad. Sci. USA 90:913-917; Svab and Maliga (1993) EMBO J. 12:601-606. The method relies on particle gun delivery of DNA containing a selectable marker and targeting of the DNA to the plastid genome through homologous recombination. Additionally, plastid transformation can be accomplished by transactivation of a silent plastid-borne transgene by tissue-preferred expression of a nuclear-encoded and plastid-directed RNA polymerase. Such a system has been reported in McBride et al. (1994) Proc. Natl. Acad. Sci. USA 91:7301-7305.

[0652] Following integration of heterologous foreign DNA into plant cells, one then applies a maximum threshold level of appropriate selection in the medium to kill the untransformed cells and separate and proliferate the putatively transformed cells that survive from this selection treatment by transferring regularly to a fresh medium. By continuous passage and challenge with appropriate selection, one identifies and proliferates the cells that are transformed with the plasmid vector. Molecular and biochemical methods can then be used to confirm the presence of the integrated heterologous gene of interest into the genome of the transgenic plant.

[0653] The cells that have been transformed may be grown into plants in accordance with conventional ways. See, for example, McCormick et al. (1986) Plant Cell Reports 5:81-84. These plants may then be grown, and either pollinated with the same transformed strain or different strains, and the resulting hybrid having constitutive expression of the desired phenotypic characteristic identified. Two or more generations may be grown to ensure that expression of the desired phenotypic characteristic is stably maintained and inherited and then seeds harvested to ensure expression of the desired phenotypic characteristic has been achieved. In this manner, the present invention provides transformed seed (also referred to as “transgenic seed”) having a nucleotide construct of the invention, for example, an expression cassette of the invention, stably incorporated into their genome.

[0654] ICK and TMOF Expression in Plants.

[0655] As noted above, there are many alternatives that could be used for the components of ERSP, ICK motif protein, TMOF motif, translational stabilizing protein and intervening linker.

[0656] Evaluation of Plant Transformations

[0657] Following introduction of heterologous foreign DNA into plant cells, the transformation or integration of heterologous gene in the plant genome is confirmed by various methods such as analysis of nucleic acids, proteins and metabolites associated with the integrated gene.

[0658] PCR analysis is a rapid method to screen transformed cells, tissue or shoots for the presence of incorporated gene at the earlier stage before transplanting into the soil (Sambrook and Russell (2001) Molecular Cloning: A Laboratory Manual. Cold Spring Harbor Laboratory Press, Cold Spring Harbor, N.Y.). PCR is carried out using oligonucleotide primers specific to the gene of interest or Agrobacterium vector background, etc.

[0659] Plant transformation may be confirmed by Southern blot analysis of genomic DNA (Sambrook and Russell, 2001, supra). In general, total DNA is extracted from the transformant, digested with appropriate restriction enzymes, fractionated in an agarose gel and transferred to a nitrocellulose or nylon membrane. The membrane or “blot” is then probed with, for example, radiolabeled .sup.32P target DNA fragment to confirm the integration of introduced gene into the plant genome according to standard techniques (Sambrook and Russell, 2001, supra).

[0660] In Northern blot analysis, RNA is isolated from specific tissues of transformant, fractionated in a formaldehyde agarose gel, and blotted onto a nylon filter according to standard procedures that are routinely used in the art (Sambrook and Russell, 2001, supra). Expression of RNA encoded by the Bt-protein is then tested by hybridizing the filter to a radioactive probe derived from a Bt-protein, by methods known in the art (Sambrook and Russell, 2001, supra).

[0661] Western blot, biochemical assays and the like may be carried out on the transgenic plants to confirm the presence of protein encoded by the Bt-protein gene by standard procedures (Sambrook and Russell, 2001, supra) using antibodies that bind to one or more epitopes present on the Bt-protein.

[0662] Pesticidal Activity in Plants

[0663] In another aspect of the invention, one may generate transgenic plants expressing a Bt-protein that has pesticidal activity. Methods described above by way of example may be utilized to generate transgenic plants, but the manner in which the transgenic plant cells are generated is not critical to this invention. Methods known or described in the art such as Agrobacterium-mediated transformation, biolistic transformation, and non-particle-mediated methods may be used. Plants expressing a Bt-protein may be isolated by common methods described in the art, for example by transformation of callus, selection of transformed callus, and regeneration of fertile plants from such transgenic callus. In such process, one may use any gene as a selectable marker so long as its expression in plant cells confers ability to identify or select for transformed cells.

[0664] A number of markers have been developed for use with plant cells, such as resistance to chloramphenicol, the aminoglycoside G418, hygromycin, or the like. Other genes that encode a product involved in chloroplast metabolism may also be used as selectable markers. For example, genes that provide resistance to plant herbicides such as glyphosate, bromoxynil, or imidazolinone may find particular use. Such genes have been reported (Stalker et al. (1985) J. Biol. Chem. 263:6310-6314 (bromoxynil resistance nitrilase gene); and Sathasivan et al. (1990) Nucl. Acids Res. 18:2188 (AHAS imidazolinone resistance gene). Additionally, the genes disclosed herein are useful as markers to assess transformation of bacterial or plant cells. Methods for detecting the presence of a transgene in a plant, plant organ (e.g., leaves, stems, roots, etc.), seed, plant cell, propagule, embryo or progeny of the same are well known in the art. In one embodiment, the presence of the transgene is detected by testing for pesticidal activity.

[0665] Fertile plants expressing a Bt-protein may be tested for pesticidal activity, and the plants showing optimal activity selected for further breeding. Methods are available in the art to assay for pest activity. Generally, the protein is mixed and used in feeding assays. See, for example Marrone et al. (1985) J. of Economic Entomology 78:290-293.

[0666] Section VI. Descriptions and Examples of CRIP and Bt Protein Combinations

[0667] The Bt and ICK peptides may inhibit the growth, impair the movement, or even kill an insect when the combination of toxin is appropriately delivered to the locus inhabited by the insect. SDP 1234604, 1234605 and 609 are spray-dried powder preparations of hybrid+2-ACTX-Hv1a peptide, here “Hv1a peptide.” The spray-dried Hv1a peptide powders are made from the peptide, various excipients and fermentation by-products. The '604 and '605 formulations use the same peptide, only the excipients are different. The concentration of the active hybrid peptide was quantified at about 26% weight/weight in both the '604 and '605 powders. The concentration of the active hybrid peptide was quantified at about 35% weight/weight in the 609 powders. The Hv1a peptide in each powder was quantified using a C18 rpHPLC methods known by those skilled in the art.

[0668] Inhibitory cysteine knot or ICK peptides can have remarkable stability when exposed to the environment. Many ICK peptides are isolated from venomous animals such as spiders, scorpions, and snakes. Bt proteins are well known because of their specific pesticidal activities. Surprisingly, we have found that, when Bt proteins are selectively mixed with ICK peptides, the combination of Bt and ICK peptides produces a highly effective insecticide with a potency much greater than expected.

[0669] We describe an insecticidal combination peptide composition comprising both a Bt (Bacillus thuringiensis) protein; and an insecticidal ICK (Inhibitor Cystine Knot) peptide. The composition can be in the ratio of Bt to ICK, on a dry weight basis, from about any or all of the following ratios: 99:1, 95:5, 90:10, 85:15, 80:20, 75:25, 70:30, 65:35, 60:40, 55:45, 50:50, 45:55, 40:60, 35:65, 30:70, 25:75, 20:80, 15:85, 10:90, 5:95 and 1:99, or any combination of any two of these values. We also describe a composition where the ratio of Bt to ICK, on a on a dry weight basis, is selected from about the following ratios: 0:50, 45:55, 40:60, 35:65, 30:70, 25:75, 20:80, 15:85, 10:90, 5:95, 1:99, 0.5:99.5, 0.1:99.9 and 0.01:99.99 or any combination of any two of these values.

[0670] The procedures described herein can be applied to any PFIP or CRIP peptide. The combination of PFIP and CRIP peptides includes either or both of the PFIP and CRIP peptides being are derived from more than 1 different types or bacterial strain origins for either one or both of PFIP and CRIP peptides. By bacterial strain origins we mean the peptides can be described as having been expressed by a bacterial strain that expresses the peptides with the understanding that many PFIP peptides including many Bt proteins are also artificial in the sense that they are no longer all developed from bacterial strains.

[0671] In another embodiment the combination of PFIP and CRIP peptides includes either or both of the PFIP such as Bt in combination with ICK, Non-ICK and TMOF peptides being derived from more than 1 different types or bacterial strain origins for either one or both of Bt and ICK peptides. By bacterial strain origins we mean the peptides can be described as having been expressed by a bacterial strain that expresses the peptides with the understanding that many Bt proteins are also artificial in the sense that they are no longer all developed from bacterial strains.

[0672] We also disclose compositions where either or both of the PFIP such as Bt in combination with ICK, Non-ICK and TMOF peptides are derived from between 2 and 5, 2-15, 2-30, 5-10, 5-15, 5-30, 5-50 and various other different types or bacterial strains origins of either one or both of Bt or ICK peptides. We disclose a composition where either or both of the Bt and ICK peptides are encoded by from 2 to 15 different types or bacterial strain origins of either one or both of Bt and ICK peptides. And any of these combinations of 2-5, 2-15, 2-30, 5-10, 5-15, 5-30, 5-50 and various other different types and mixtures of Bt and ICK peptides can contribute more than at least 1% of each strain type to the composition.

[0673] We disclose composition of Bt and ICK peptides where the total concentration of PFIP such as Bt in combination with ICK, Non-ICK and TMOF peptides in the mixture is selected from the following percent concentrations: 1, 5, 10, 15, 20, 25, 30, 35, 40, 45, 50, 55, 60, 65, 70, 75, 80, 85, 90, 95 or 99%, or any range between any two of these values, and the remaining percentage of the mixture is comprised of excipients. We disclose compositions wherein the insecticidal combination peptide is produced using a genetic cassette that further comprises an ERSP (Endoplasmic Reticulum Signal Peptide) operably linked to the ICK, Non-ICK and/or TMOF peptides insecticidal ICK peptide, wherein said ERSP is linked at the N-terminal of the insecticidal ICK peptide. We disclose compositions wherein the insecticidal combination peptide is produced using a genetic cassette that further comprises an ERSP (Endoplasmic Reticulum Signal Peptide) operably linked to the insecticidal ICK peptide, wherein said ERSP is linked at the N-terminal of the insecticidal ICK peptide, wherein the ERSP is BAAS.

[0674] We disclose compositions wherein said combination peptide is produced using a genetic cassette that further comprises a dipeptide operably linked to the insecticidal ICK peptide, wherein said dipeptide is linked at the N-terminal of the insecticidal ICK peptide; and wherein the dipeptide is comprised of one nonpolar amino acid on the N-terminal of the dipeptide and one polar amino acid on the C-terminal of the dipeptide, including embodiments where the dipeptide is glycine-serine, including embodiments where the insecticidal ICK peptide is any insecticidal peptide that inhibits both voltage-gated Calcium channels and Calcium-activated potassium channels in insects, including embodiments where the insecticidal ICK peptide origins from any species of Australian Funnel-web spider, including embodiments where the spider is selected from the Australian Funnel-web spiders of genus Atrax or Hadronyche, including embodiments where the spider is selected from the Australian Funnel-web spiders of genus Hadronyche, including embodiments where the spider is selected from the Australian Blue Mountains Funnel-web, Hadronyche versuta, including embodiments where the insecticidal ICK peptide is Hybrid-ACTX-Hv1a, including embodiments where the insecticidal ICK peptide contains 20-100 amino acids and 2-4 disulfide bonds, including embodiments where said insecticidal ICK peptide is any insecticidal peptide with at least 50%, 55%, 60%, 65%, 70%, 75%, 80%, 85%, 90%, 95%, 96%, 97%, 98%, or 99% or greater sequence identity to any of the ICK sequences disclosed herein, including embodiments where the insecticidal ICK peptide is selected from publications incorporated by reference, including embodiments where the Bt protein is any insecticidal Bt protein, including embodiments where the Bt protein is a Cry or Cyt protein, including embodiments where the Bt protein is selected from the group consisting of a Cry1, Cry3, TIC851, CryET70, Cry22, TIC901, TIC201, TIC407, TIC417, a binary insecticidal protein CryET80, and CryET76, a binary insecticidal protein TIC100 and TIC101, a combination of an insecticidal protein ET29 or ET37 with an insecticidal protein TIC810 or TIC812 and a binary insecticidal protein PS149B1, including embodiments where the Bt Protein is selected from a Cry protein, a Cry1A protein or a Cry1F protein, including embodiments where the Bt protein is a combination Cry1F-Cry1A protein, including embodiments where the Bt protein comprises an amino acid sequence at least 90% identical to SEQ ID NOs: 10, 12, 14, 26, 28, or 34 of U.S. Pat. No. 7,304,206, including embodiments where the Bt Protein is Dipel, including embodiments where the Bt protein is Thuricide.

[0675] We disclose a composition comprising the nucleotides of: Bt (Bacillus thuringiensis) Protein; and an insecticidal ICK (Inhibitor Cystine Knot) protein, in a transformed plant or plant genome; where the ratio of Bt to ICK, on a dry weight basis, is selected from about the following ratios: 99:1, 95:5, 90:10, 85:15, 80:20, 75:25, 70:30, 65:35, 60:40, 55:45, 50:50, 45:55, 40:60, 35:65, 30:70, 25:75, 20:80, 15:85, 10:90, 5:95 and 1:99, or any combination of any two of these values.

[0676] We disclose transformed plant or plant genome wherein the ratio of PFIP such as Bt to ICK, Non-ICK and TMOF peptides; and preferably Bt to ICK, or Bt to an Anemone toxin, on a dry weight basis, is selected from about the following ratios: 50:50, 45:55, 40:60, 35:65, 30:70, 25:75, 20:80, 15:85, 10:90, 5:95, 1:99, 0.5:99.5, 0.1:99.9 and 0.01:99.99 or any combination of any two of these values. The transformed plant or plant genome may have either or both of the Bt and ICK or Bt and Anemone proteins are derived from more than 1 different type or bacterial strain origin of Bt or ICK proteins, or either or both of the Bt and ICK proteins are derived from between 2 and 5 different type or bacterial strain origin of either Bt or ICK proteins or both Bt and ICK proteins are derived from between 2 and 5 different types or strain origins, or either or both of the Bt and ICK proteins are derived from 2 to 15 different type or bacterial strain origins of either or both of Bt and ICK proteins and at least one strain of either Bt or ICK or both Bt and ICK proteins encoded by more than one copy of the Bt or ICK genes, or either or both of the Bt and ICK proteins are derived from more than one different type or bacterial strain origin of Bt and/or ICK proteins where all the strains of Bt and/or ICK proteins contribute more than at least 1% of each strain type to said composition, or either or both of the Bt and ICK proteins are derived from 2 to 5 different type or bacterial strain origins of either or both of Bt and ICK proteins and at least one strain of either Bt or ICK or both Bt and ICK proteins encoded by more than one copy of the Bt of ICK genes, or the total concentration of Bt and ICK protein in the composition can be selected from the following percent concentrations: 1, 5, 10, 15, 20, 25, 30, 35, 40, 45, 50, 55, 60, 65, 70, 75, 80, 85, 90, 95 or 99%, or any range between any two of these values, and the remaining percentage of the mixture is comprised of excipients.

[0677] The compositions and plants described herein include an insecticidal combination protein produced using a genetic cassette that further comprises an ERSP (Endoplasmic Reticulum Signal Peptide) operably linked to the insecticidal ICK peptide, wherein said ERSP is linked at the N-terminal of the insecticidal ICK peptide. In another embodiment the insecticidal combination peptide is produced using a genetic cassette that further comprises an ERSP (Endoplasmic Reticulum Signal Peptide) operably linked to the insecticidal ICK peptide, wherein said ERSP is linked at the N-terminal of the insecticidal ICK peptide, wherein the ERSP is BAAS. In another embodiment the transgenic plant incorporating and expressing the combination peptides from the nucleotides described herein, wherein said combination peptide is produced using a genetic cassette that further comprises nucleotides expressing a dipeptide operably linked to the insecticidal ICK peptide, wherein said dipeptide is linked at the N-terminal of the insecticidal ICK peptide; and wherein the dipeptide is comprised of one nonpolar amino acid on the N-terminal of the dipeptide and one polar amino acid on the C-terminal of the dipeptide. In another embodiment the transgenic plant has a dipeptide that glycine-serine. In another embodiment the transgenic plant has insecticidal ICK peptides expressed that are comprised of an insecticidal peptide combination of ICK and Bt proteins. The transgenic plants can have an insecticidal ICK peptide derived from any species of Australian Funnel-web spider, or the Australian Funnel-web spiders of genus Atrax or Hadronyche, and the Australian Blue Mountains Funnel-web, Hadronyche versuta.

[0678] We describe and claim a transgenic plant wherein the insecticidal ICK peptide expressed is Hybrid-ACTX-Hv1a, and or the insecticidal ICK peptide expressed may contain 20-100 amino acids and 2-4 disulfide bonds and or the insecticidal ICK peptide is any insecticidal peptide with at least 50%, 55%, 60%, 65%, 70%, 75%, 80%, 85%, 90%, 95%, 96%, 97%, 98%, or 99% or greater sequence identity to any of the ICK peptides described herein. The transgenic plants disclosed can contain any known Bt protein, including peptides where the Bt protein is a Cry or Cyt protein, and/or the Bt protein is selected from the group consisting of a Cry1, Cry3, TIC851, CryET70, Cry22, TIC901, TIC201, TIC407, TIC417, a binary insecticidal protein CryET80, and CryET76, a binary insecticidal protein TIC100 and TIC101, a combination of an insecticidal protein ET29 or ET37 with an insecticidal protein TIC810 or TIC812 and a binary insecticidal protein PS149B1. The Bt protein can be selected from a Cry protein, a Cry1A protein or a Cry1F protein, or a combination Cry1F-Cry1A protein, or it comprises an amino acid sequence at least 90% identical to SEQ ID NOs: 10, 12, 14, 26, 28, or 34 of U.S. Pat. No. 7,304,206. We describe a transgenic plant wherein the Bt protein is Dipel and we describe a transgenic plant wherein the Bt protein is Thuricide.

[0679] We specifically describe and claim a transformed plant expressing the peptides described herein where the average concentration of Bt and ICK peptide, in an average leaf of a transformed plant is about: 1, 5, 10, 15, 20, 25, 30, 35, 40, 45, 50, 55, 60, 65, 70, 75, 80, 85, 90, 95 or 99%, or any range between any two of these values. We specifically describe and claim a transformed plant expressing properly folded toxic peptides in the transformed plant. We specifically describe and claim a transformed plant expressing properly folded combination toxic peptides in the transformed plant and to cause the accumulation of the expressed and properly folded toxic peptides in said plant and to cause an increase in the plant's yield or resistance to insect damage and they control insect pests in crops and forestry. We describe plants made by any of the products and processes described herein.

[0680] We describe expression cassettes comprising any of the nucleotides which express any peptides described herein, including embodiments having a functional expression cassette incorporated into a transformed plant, comprising nucleotides that code for any of the peptides disclosed herein or that could be made by one skilled in the art given the teaching disclosed herein. We describe and claim procedures for the generation of transformed plants having or expressing any of the peptides described herein.

[0681] We describe the use of any of the peptides or nucleotides described herein, to make a plant or transform these peptides or nucleotides into a plant, and methods and techniques for generating these proteins in plants and/or expression cassettes comprising any of the peptides and methods to transform them into a plant genome and any method of using, making, transforming any of the described peptides or nucleotides into a plant and methods and techniques for generating transformed plants having or expressing any of the peptides and functional expression cassettes in plants comprising any of the disclosed peptides and their corresponding nucleotides and any plants made by the products and processes described herein.

[0682] In some embodiments we disclose a chimeric gene comprising a promoter active in plants operatively linked to the nucleic acids or expression cassettes as described herein. We disclose a method of making, producing, or using the combination of genes described herein. We disclose a recombinant vector comprising the combination of genes described herein. We disclose a method of making, producing, or using the recombinant vector. We disclose a transgenic host cell comprising the combination of genes described herein and the method of making, producing or using the transgenic host cell, which can be a transgenic plant cell and we disclose a method of making, producing or using such a transgenic plant cell as well as the transgenic plant comprising the transgenic plant cell and how to make and use the transgenic plant. We disclose transgenic plant and seed having the properties described herein that is derived from corn, soybean, cotton, rice, sorghum, switchgrass, sugarcane, alfalfa, potatoes or tomatoes. The transgenic seed may have a chimeric gene that we describe herein. We describe methods of making, producing or using the transgenic plant and or seed of this disclosure.

[0683] We also describe methods of using the invention and provide novel formulations. The invention is most useful to control insects. We describe a method of controlling an insect comprising: Applying Bt (Bacillus thuringiensis) protein to said insect; and Applying an insecticidal ICK (Inhibitor Cystine Knot) peptide to said insect. This method may be used where the Bt protein and the insecticidal ICK peptide are applied together at the same time in the same compositions or separately in different compositions and at different times. The Bt protein and the insecticidal ICK peptide may be applied sequentially, and it may be applied to (Bt protein)-resistant insects. The ratio of Bt to ICK, on a dry weight basis, can be selected from at least about the following ratios: 99:1, 95:5, 90:10, 85:15, 80:20, 75:25, 70:30, 65:35, 60:40, 55:45, 50:50, 45:55, 40:60, 35:65, 30:70, 25:75, 20:80, 15:85, 10:90, 5:95 and 1:99, or any combination of any two of these values. The ratio of Bt to ICK, on a dry weight basis, can be selected from about the following ratios: 50:50, 45:55, 40:60, 35:65, 30:70, 25:75, 20:80, 15:85, 10:90, 5:95, 1:99, 0.5:99.5, 0.1:99.9 and 0.01:99.99 or any combination of any two of these values. Either or both of the Bt and ICK peptides are derived from more than 1 different types or bacterial strain origins of Bt and ICK peptides. Either or both of the Bt and ICK peptides are derived from between 2 and 5 different types or bacterial strain origins of either Bt or ICK peptides or both Bt and ICK peptides. Either or both of the Bt and ICK peptides are derived from 2 to 15 different types or bacterial strain origins of either or both of Bt and ICK peptides and at least one strain of either Bt or ICK or both Bt and ICK peptides are encoded by more than one copy of the Bt or ICK genes. Either one or both of the Bt and ICK peptides are derived from more than 1 different types or bacterial strain origins of Bt and/or ICK peptides with all the strains of Bt and/or ICK peptides contributing more than at least 1% of the peptides from each strain type in said composition. Either or both of the Bt and ICK peptides are derived from 2 to 5 different types or bacterial strain origins of either one or both of Bt and ICK peptides and at least one strain of either Bt or ICK or both Bt and ICK peptides are encoded by more than one copy of the Bt or ICK genes. The total concentration of Bt and ICK peptide in the mixture is selected from the following percent concentrations: 1, 5, 10, 15, 20, 25, 30, 35, 40, 45, 50, 55, 60, 65, 70, 75, 80, 85, 90, 95 or 99%, or any range between any two of these values, and the remaining percentage of the mixture is comprised of excipients.

[0684] The methods can be used where the insecticidal combination peptide is produced using a genetic cassette that further comprises an ERSP (Endoplasmic Reticulum Signal Peptide) operably linked to the insecticidal ICK peptide, wherein said ERSP is linked at the N-terminal of the insecticidal ICK peptide. In some embodiments the insecticidal combination peptides used are produced using a genetic cassette that further comprises an ERSP (Endoplasmic Reticulum Signal Peptide) operably linked to the insecticidal ICK peptide, wherein said ERSP is linked at the N-terminal of the insecticidal ICK peptide, wherein the ERSP is BAAS.

[0685] Any of the peptides and plants described herein can be used to control insects, their growth and damage, especially their damage to plants. The combination Bt Protein and insecticidal ICK peptide can be applied by being sprayed on a plant, or the insect's locus, or the locus of a plant in need of protecting.

[0686] We also describe formulations comprising: Bt Protein; and an insecticidal ICK peptide which can include any of the compositions described herein or capable of being made by one skilled in the art given this disclosure. Some of the described formulations include the use of a polar aprotic solvent, and or water, and or where the polar aprotic solvent is present in an amount of 1-99 wt %, the polar protic solvent is present in an amount of 1-99 wt %, and the water is present in an amount of 0-98 wt %. The formulations include formulations where the Bt protein is Dipel and where the insecticidal ICK peptide is a hybrid-ACTX-Hv1a peptide. The polar aprotic solvent formulations are especially effective when they contain MSO. The examples below are intended to illustrate and not limit the invention in any manner.

[0687] Section VII. Descriptions and Examples of TMOF and Bt Combinations

[0688] The Bt and TMOF peptides may inhibit the growth, impair the movement, or even kill an insect when the combination of toxin is appropriately delivered to the locus inhabited by the insect. The spray-dried powders are made from the peptide, various excipients and fermentation by-products.

[0689] We describe an insecticidal combination peptide composition comprising both a Bt (Bacillus thuringiensis) protein; and an insecticidal TMOF peptide. The composition can be in the ratio of Bt to TMOF, on a dry weight basis, from about any or all of the following ratios: 99:1, 95:5, 90:10, 85:15, 80:20, 75:25, 70:30, 65:35, 60:40, 55:45, 50:50, 45:55, 40:60, 35:65, 30:70, 25:75, 20:80, 15:85, 10:90, 5:95 and 1:99, or any combination of any two of these values. We also describe a composition where the ratio of Bt to TMOF, on a on a dry weight basis, is selected from about the following ratios: 0:50, 45:55, 40:60, 35:65, 30:70, 25:75, 20:80, 15:85, 10:90, 5:95, 1:99, 0.5:99.5, 0.1:99.9 and 0.01:99.99 or any combination of any two of these values.

[0690] In another embodiment the combination of Bt and TMOF peptides includes either or both of the Bt and TMOF peptides being are derived from more than 1 different types or bacterial strain origins for either one or both of Bt and TMOF peptides. By bacterial strain origins we mean the peptides can be described as having been expressed by a bacterial strain that expresses the peptides with the understanding that many Bt proteins are also artificial in the sense that they are no longer all developed from bacterial strains.

[0691] We also disclose compositions where either or both of the Bt and TMOF peptides are derived from between 2 and 5, 2-15, 2-30, 5-10, 5-15, 5-30, 5-50 and various other different types or bacterial strains origins of either one or both of Bt or TMOF peptides. We disclose a composition where either or both of the Bt and TMOF peptides are encoded by from 2 to 15 different types or bacterial strain origins of either one or both of Bt and TMOF peptides. And any of these combinations of 2-5, 2-15, 2-30, 5-10, 5-15, 5-30, 5-50 and various other different types and mixtures of Bt and TMOF peptides can contribute more than at least 1% of each strain type to the composition.

[0692] We disclose composition of Bt and TMOF where the total concentration of Bt and TMOF peptide in the mixture is selected from the following percent concentrations: 1, 5, 10, 15, 20, 25, 30, 35, 40, 45, 50, 55, 60, 65, 70, 75, 80, 85, 90, 95 or 99%, or any range between any two of these values, and the remaining percentage of the mixture is comprised of excipients. We disclose compositions wherein the insecticidal combination peptide is produced using a genetic cassette that further comprises an ERSP (Endoplasmic Reticulum Signal Peptide) operably linked to the insecticidal TMOF peptide, wherein said ERSP is linked at the N-terminal of the insecticidal TMOF peptide. We disclose compositions wherein the insecticidal combination peptide is produced using a genetic cassette that further comprises an ERSP (Endoplasmic Reticulum Signal Peptide) operably linked to the insecticidal TMOF peptide, wherein said ERSP is linked at the N-terminal of the insecticidal TMOF peptide, wherein the ERSP is BAAS.

[0693] We disclose compositions wherein said combination peptide is produced using a genetic cassette that further comprises a dipeptide operably linked to the insecticidal TMOF peptide, wherein said dipeptide is linked at the N-terminal of the insecticidal TMOF peptide; and wherein the dipeptide is comprised of one nonpolar amino acid on the N-terminal of the dipeptide and one polar amino acid on the C-terminal of the dipeptide, including embodiments where the dipeptide is glycine-serine, including embodiments where the insecticidal TMOF peptide is any includes embodiments where the insecticidal TMOF peptide is at least 50%, 55%, 60%, 65%, 70%, 75%, 80%, 85%, 90%, 95%, 96%, 97%, 98%, or 99% or greater sequence identity to any of the TMOF sequences disclosed herein, including embodiments where the Bt Protein is any insecticidal Bt Protein, including embodiments where the Bt Protein is a Cry or Cyt protein, including embodiments where the Bt Protein is selected from the group consisting of a Cry1, Cry3, TIC851, CryET70, Cry22, TIC901, TIC201, TIC407, TIC417, a binary insecticidal protein CryET80, and CryET76, a binary insecticidal protein TIC100 and TIC101, a combination of an insecticidal protein ET29 or ET37 with an insecticidal protein TIC810 or TIC812 and a binary insecticidal protein PS149B1, including embodiments where the Bt protein is selected from a Cry protein, a Cry1A protein or a Cry1F protein, including embodiments where the Bt protein is a combination Cry1F-Cry1A protein, including embodiments where the Bt protein comprises an amino acid sequence at least 90% identical to SEQ ID NOs: 10, 12, 14, 26, 28, or 34 of U.S. Pat. No. 7,304,206, including embodiments where the Bt Endotoxin is Dipel, including embodiments where the Bt Protein is Thuricide.

[0694] We disclose a composition comprising the nucleotides of: Bt (Bacillus thuringiensis) protein; and an insecticidal TMOF peptide, in a transformed plant or plant genome; where the ratio of Bt to TMOF, on a dry weight basis, is selected from about the following ratios: 99:1, 95:5, 90:10, 85:15, 80:20, 75:25, 70:30, 65:35, 60:40, 55:45, 50:50, 45:55, 40:60, 35:65, 30:70, 25:75, 20:80, 15:85, 10:90, 5:95 and 1:99, or any combination of any two of these values.

[0695] We disclose transformed plant or plant genome wherein the ratio of Bt to TMOF, on a dry weight basis, is selected from about the following ratios: 50:50, 45:55, 40:60, 35:65, 30:70, 25:75, 20:80, 15:85, 10:90, 5:95, 1:99, 0.5:99.5, 0.1:99.9 and 0.01:99.99 or any combination of any two of these values. The transformed plant or plant genome may have either or both of the Bt and TMOF peptides are derived from more than 1 different type or bacterial strain origin of Bt or TMOF peptides, or either or both of the Bt and TMOF peptides are derived from between 2 and 5 different type or bacterial strain origin of either Bt or TMOF peptides or both Bt and TMOF peptides are derived from between 2 and 5 different types or strain origins, or either or both of the Bt and TMOF peptides are derived from 2 to 15 different type or bacterial strain origins of either or both of Bt and TMOF peptides and at least one strain of either Bt or TMOF or both Bt and TMOF peptides encoded by more than one copy of the Bt or TMOF genes, or either or both of the Bt and TMOF peptides are derived from more than one different type or bacterial strain origin of Bt and/or TMOF peptides where all the strains of Bt and/or TMOF peptides contribute more than at least 1% of each strain type to said composition, or either or both of the Bt and TMOF peptides are derived from 2 to 5 different type or bacterial strain origins of either or both of Bt and TMOF peptides and at least one strain of either Bt or TMOF or both Bt and TMOF peptides encoded by more than one copy of the Bt of TMOF genes, or the total concentration of Bt and TMOF peptide in the composition can be selected from the following percent concentrations: 1, 5, 10, 15, 20, 25, 30, 35, 40, 45, 50, 55, 60, 65, 70, 75, 80, 85, 90, 95 or 99%, or any range between any two of these values, and the remaining percentage of the mixture is comprised of excipients.

[0696] The compositions and plants described herein include an insecticidal combination peptide produced using a genetic cassette that further comprises an ERSP (Endoplasmic Reticulum Signal Peptide) operably linked to the insecticidal TMOF peptide, wherein said ERSP is linked at the N-terminal of the insecticidal TMOF peptide. In another embodiment the insecticidal combination peptide is produced using a genetic cassette that further comprises an ERSP (Endoplasmic Reticulum Signal Peptide) operably linked to the insecticidal TMOF peptide, wherein said ERSP is linked at the N-terminal of the insecticidal TMOF peptide, wherein the ERSP is BAAS. In another embodiment the transgenic plant incorporating and expressing the combination peptides from the nucleotides described herein, wherein said combination peptide is produced using a genetic cassette that further comprises nucleotides expressing a dipeptide operably linked to the insecticidal TMOF peptide, wherein said dipeptide is linked at the N-terminal of the insecticidal TMOF peptide; and wherein the dipeptide is comprised of one nonpolar amino acid on the N-terminal of the dipeptide and one polar amino acid on the C-terminal of the dipeptide. In another embodiment the transgenic plant has a dipeptide that is glycine-serine. In another embodiment the transgenic plant has insecticidal TMOF peptides expressed that are comprised of an insecticidal peptide combination of TMOF and Bt proteins. The transgenic plants can have an insecticidal TMOF peptide derived from any TMOF species.

[0697] We describe and claim a transgenic plant wherein the insecticidal TMOF peptide expressed is may contain 20-100 amino acids and or the insecticidal TMOF peptide is any insecticidal peptide with at least 50%, 55%, 60%, 65%, 70%, 75%, 80%, 85%, 90%, 95%, 96%, 97%, 98%, or 99% or greater sequence identity to any of the TMOF peptides described herein. The transgenic plants disclosed can contain any known Bt Protein, including peptides where the Bt Protein is a Cry or Cyt protein, and/or the Bt Protein is selected from the group consisting of a Cry1, Cry3, TIC851, CryET70, Cry22, TIC901, TIC201, TIC407, TIC417, a binary insecticidal protein CryET80, and CryET76, a binary insecticidal protein TIC100 and TIC101, a combination of an insecticidal protein ET29 or ET37 with an insecticidal protein TIC810 or TIC812 and a binary insecticidal protein PS149B1. The Bt Protein can be selected from a Cry protein, a Cry1A protein or a Cry1F protein, or a combination Cry1F-Cry1A protein, or it comprises an amino acid sequence at least 90% identical to SEQ ID NOs: 10, 12, 14, 26, 28, or 34 of U.S. Pat. No. 7,304,206. We describe a transgenic plant wherein the Bt Protein is Dipel and we describe a transgenic plant wherein the Bt Protein is Thuricide.

[0698] We specifically describe and claim a transformed plant expressing the peptides described herein where the average concentration of Bt and TMOF peptide, in an average leaf of a transformed plant is about: 1, 5, 10, 15, 20, 25, 30, 35, 40, 45, 50, 55, 60, 65, 70, 75, 80, 85, 90, 95 or 99%, or any range between any two of these values. We specifically describe and claim a transformed plant expressing properly folded toxic peptides in the transformed plant. We specifically describe and claim a transformed plant expressing properly folded combination toxic peptides in the transformed plant and to cause the accumulation of the expressed and properly folded toxic peptides in said plant and to cause an increase in the plant's yield or resistance to insect damage and they control insect pests in crops and forestry. We describe plants made by any of the products and processes described herein.

[0699] We describe expression cassettes comprising any of the nucleotides which express any peptides described herein, including embodiments having a functional expression cassette incorporated into a transformed plant, comprising nucleotides that code for any of the peptides disclosed herein or that could be made by one skilled in the art given the teaching disclosed herein. We describe and claim procedures for the generation of transformed plants having or expressing any of the peptides described herein.

[0700] We describe the use of any of the peptides or nucleotides described herein, to make a plant or transform these peptides or nucleotides into a plant, and methods and techniques for generating these proteins in plants and/or expression cassettes comprising any of the peptides and methods to transform them into a plant genome and any method of using, making, transforming any of the described peptides or nucleotides into a plant and methods and techniques for generating transformed plants having or expressing any of the peptides and functional expression cassettes in plants comprising any of the disclosed peptides and their corresponding nucleotides and any plants made by the products and processes described herein.

[0701] In some embodiments we disclose a chimeric gene comprising a promoter active in plants operatively linked to the nucleic acids or expression cassettes as described herein. We disclose a method of making, producing, or using the combination of genes described herein. We disclose a recombinant vector comprising the combination of genes described herein. We disclose a method of making, producing, or using the recombinant vector. We disclose a transgenic host cell comprising the combination of genes described herein and the method of making, producing or using the transgenic host cell, which can be a transgenic plant cell and we disclose a method of making, producing or using such a transgenic plant cell as well as the transgenic plant comprising the transgenic plant cell and how to make and use the transgenic plant. We disclose transgenic plant and seed having the properties described herein that is derived from corn, soybean, cotton, rice, sorghum, switchgrass, sugarcane, alfalfa, potatoes or tomatoes. The transgenic seed may have a chimeric gene that we describe herein. We describe methods of making, producing or using the transgenic plant and or seed of this disclosure.

[0702] We also describe methods of using the invention and provide novel formulations. The invention is most useful to control insects. We describe a method of controlling an insect comprising: Applying Bt (Bacillus thuringiensis) protein to said insect; and Applying an insecticidal TMOF peptide to said insect. This method may be used where the Bt protein and the insecticidal ICK peptide are applied together at the same time in the same compositions or separately in different compositions and at different times. The Bt Protein and the insecticidal TMOF peptide may be applied sequentially, and it may be applied to (Bt Protein)-resistant insects. The ratio of Bt to TMOF, on a dry weight basis, can be selected from at least about the following ratios: 99:1, 95:5, 90:10, 85:15, 80:20, 75:25, 70:30, 65:35, 60:40, 55:45, 50:50, 45:55, 40:60, 35:65, 30:70, 25:75, 20:80, 15:85, 10:90, 5:95 and 1:99, or any combination of any two of these values. The ratio of Bt to TMOF, on a dry weight basis, can be selected from about the following ratios: 50:50, 45:55, 40:60, 35:65, 30:70, 25:75, 20:80, 15:85, 10:90, 5:95, 1:99, 0.5:99.5, 0.1:99.9 and 0.01:99.99 or any combination of any two of these values. Either or both of the Bt and TMOF peptides are derived from more than 1 different types or bacterial strain origins of Bt and TMOF peptides. Either or both of the Bt and TMOF peptides are derived from between 2 and 5 different types or bacterial strain origins of either Bt or TMOF peptides or both Bt and TMOF peptides. Either or both of the Bt and TMOF peptides are derived from 2 to 15 different types or bacterial strain origins of either or both of Bt and TMOF peptides and at least one strain of either Bt or TMOF or both Bt and TMOF peptides are encoded by more than one copy of the Bt or TMOF genes. Either one or both of the Bt and TMOF peptides are derived from more than 1 different types or bacterial strain origins of Bt and/or TMOF peptides with all the strains of Bt and/or TMOF peptides contributing more than at least 1% of the peptides from each strain type in said composition. Either or both of the Bt and TMOF peptides are derived from 2 to 5 different types or bacterial strain origins of either one or both of Bt and TMOF peptides and at least one strain of either Bt or TMOF or both Bt and TMOF peptides are encoded by more than one copy of the Bt or TMOF genes. The total concentration of Bt and TMOF peptide in the mixture is selected from the following percent concentrations: 1, 5, 10, 15, 20, 25, 30, 35, 40, 45, 50, 55, 60, 65, 70, 75, 80, 85, 90, 95 or 99%, or any range between any two of these values, and the remaining percentage of the mixture is comprised of excipients.

[0703] The methods can be used where the insecticidal combination peptide is produced using a genetic cassette that further comprises an ERSP (Endoplasmic Reticulum Signal Peptide) operably linked to the insecticidal TMOF peptide, wherein said ERSP is linked at the N-terminal of the insecticidal TMOF peptide. In some embodiments the insecticidal combination peptides used are produced using a genetic cassette that further comprises an ERSP (Endoplasmic Reticulum Signal Peptide) operably linked to the insecticidal TMOF peptide, wherein said ERSP is linked at the N-terminal of the insecticidal TMOF peptide, wherein the ERSP is BAAS.

[0704] Any of the peptides and plants described herein can be used to control insects, their growth and damage, especially their damage to plants. The combination Bt protein and insecticidal TMOF peptide can be applied by being sprayed on a plant, or the insect's locus, or the locus of a plant in need of protecting.

[0705] We also describe formulations comprising: Bt proteins; and an insecticidal TMOF peptide which can include any of the compositions described herein or capable of being made by one skilled in the art given this disclosure. Some of the described formulations include the use of a polar aprotic solvent, and or water, and or where the polar aprotic solvent is present in an amount of 1-99 wt %, the polar protic solvent is present in an amount of 1-99 wt %, and the water is present in an amount of 0-98 wt %. The formulations include formulations where the Bt protein is Dipel and where the insecticidal TMOF peptide is a peptide like any of the TMOF peptides provided in the sequence listing. The polar aprotic solvent formulations are especially effective when they contain MSO. The examples below are intended to illustrate and not limit the invention in any manner.

[0706] To summarize, we describe in Part III, the following:

[0707] A composition comprising at least two types of insecticidal protein or peptides wherein one type is a Pore Forming Insecticidal Protein (PFIP) and the other type is a Cysteine Rich Insecticidal Peptide (CRIP). Where the composition can comprise at least two types of insecticidal peptides wherein one type is Pore Forming Insecticidal Protein (PFIP), wherein said PFIP is a Bt protein and the other type is Cysteine Rich Insecticidal Peptide (CRIP), wherein said CRIP is an ICK protein, wherein said ICK protein is derived from the funnel web spider. We describe a process of: a) evaluation and optional testing of an insect or a sample of insects to determine whether or not the insects show resistance to a PFIP and b) when the result of said evaluation leads to the conclusion that said sample of insects are resistant to a PFIP then c) the application of one or more CRIPS and optionally the CRIPS can be an ICK from Hadronyche versuta, or the Blue Mountain funnel web spider, Atrax robustus, Atrax formidabilis, Atrax infensus, including toxins known as U-ACTX polypeptides, U-ACTX-Hv1a, rU-ACTX-Hv1a, rU-ACTX-Hv1b, or mutants or variants, or the CRIP can be a Non-ICK from sea anemones, from the sea anemone named Anemonia viridi, the peptides named Av2 and Av3 especially peptides of similar to these in the sequence listing. We describe a method of controlling Insects including Bt resistant insects comprising, creating composition of at least two types of peptides wherein one type of peptide is a pore forming insecticidal peptide (PFIP) and the other type of peptide is a cysteine rich insecticidal peptide (CRIP) and the PFIP and CRIP proteins are selected from any of the compositions described herein and from any of the proteins provided in the sequence listing and then applying said composition to the locus of the insect. We describe a method of controlling Insects including Bt resistant insects comprising protecting a plant from Bt resistant insects comprising, creating a plant which expresses a combination of at least two properly folded peptides wherein one type of peptide is a pore forming insecticidal peptide (PFIP) and the other type of peptide is a cysteine rich insecticidal peptide (CRIP) and the PFIP and CRIP proteins are selected from any of the compositions described herein and from any of the proteins provided in the sequence listing. We describe a process of: a) evaluation and optional testing of an insect or a sample of insects to determine whether or not the insects show resistance to a PFIP and b) when the result of said evaluation leads to the conclusion that said sample of insects are resistant to a PFIP then c) the application of one or more CRIPS and optionally d) the application of a combination of PFIP and CRIP, in either concurrent or sequential applications.

[0708] We describe a composition comprising at least two types of insecticidal protein or peptides wherein one type is a Pore Forming Insecticidal Protein (PFIP) and the other type is a Cysteine Rich Insecticidal Peptide (CRIP). A composition where the CRIP is an ICK and optionally, said ICK is derived from, or originates from, Hadronyche versuta, or the Blue Mountain funnel web spider, Atrax robustus, Atrax formidabilis, Atrax infensus, including toxins known as U-ACTX polypeptides, U-ACTX-Hv1a, rU-ACTX-Hv1a, rU-ACTX-Hv1b, or mutants or variants. A composition where the CRIP is a Non-ICK CRIP and optionally said Non-ICK CRIP is derived from, or originates from, animals having Non-ICK CRIPS such as sea anemones, sea urchins and sea slugs, optionally including the sea anemone named Anemonia viridi, optionally including the peptides named Av2 and Av3 especially peptides similar to Av2 and Av3 including such peptides listed in the sequence listing or mutants or variants. A method of using the composition control Insects including Bt resistant insects comprising, creating composition of at least two types of peptides wherein one type of peptide is a pore forming insecticidal protein (PFIP) and the other type of peptide is a cysteine rich insecticidal peptide (CRIP) and the PFIP and CRIP proteins are selected from any of the compositions described in claim 1 and herein and from any of the proteins provided in the sequence listing and then applying said composition to the locus of the insect. A method controlling Insects including Bt resistant insects comprising protecting a plant from Bt resistant insects comprising, creating a plant which expresses a combination of at least two properly folded peptides wherein one type of peptide is a pore forming insecticidal protein (PFIP) and the other type of peptide is a cysteine rich insecticidal peptide (CRIP) and the PFIP and CRIP proteins are selected from any of the compositions described herein and from any of the proteins provided in the sequence listing. A method of controlling insects including Bt resistant insects where the CRIP is administered any time during which the PFIP is affecting the lining of the insect gut. A method of controlling insects including Bt resistant insects where the CRIP is administered following the testing of the insect for Bt resistance and wherein said insect tested positive for Bt resistance. The application or delivery of any of the compounds described herein in solid or liquid form to either the insect, the locus of the insect or as a Plant Incorporated Protectant.

[0709] We describe a composition comprising at least two types of insecticidal peptides wherein one type is a pore forming insecticidal protein (PFIP), wherein said PFIP is a cry protein and the other type is a cysteine rich insecticidal peptide (CRIP), wherein said CRIP is an ICK protein, wherein said ICK protein is derived from the funnel web spider. We describe a composition comprising at least two types of insecticidal peptides wherein one type is a pore forming insecticidal peptide (PFIP), wherein said PFIP has as its origin the Bt organism and the other type is a cysteine rich insecticidal peptide (CRIP), wherein said CRIP is a Non-ICK protein. We describe a composition comprising at least two types of insecticidal peptides wherein one type is a pore forming insecticidal peptide (PFIP) and the other type is a TMOF. We describe a method of protecting a plant from Insects including Bt resistant insects comprising creating a Plant Incorporating a combination of at least two different types of peptides wherein one type of peptide is a pore forming insecticidal peptide (PFIP) and the other type is a cysteine rich insecticidal peptide (CRIP). We describe a method of protecting a plant from Insects including Bt resistant insects comprising, creating a plant which expresses a combination of at least two properly folded peptides wherein one type of peptide is a pore forming insecticidal peptide (PFIP) and the other type of peptide is a cysteine rich insecticidal peptide (CRIP) and the PFIP and CRIP proteins are selected from any of the compositions described herein and from any of the proteins provided in the sequence listing.

[0710] We describe an insecticidal combination peptide composition comprising Cysteine Rich Insecticidal protein (CRIP); such as an insecticidal ICK (Inhibitor Cystine Knot) peptide like a spider peptide or Non-ICK like a sea anemone toxin combined with a with pore forming insecticidal protein (PFIP) like a Bt peptide, such as cry, cyt or VIP; or a or a Cysteine Rich Insecticidal protein (CRIP); such as an insecticidal ICK (Inhibitor Cystine Knot) peptide combined with a with a TMOF (trypsin modulating oostatic factor) peptide. Note the CRIP can be a Non-ICK protein like a sea anemone peptide, such as Av2 and Av3 and other similar sequences in the Sequence Listing. We describe such compositions where the ratio of Bt to CRIP, Bt to ICK, Bt to non-ICK CRIP, Bt to TMOF, or Bt to ICK and TMOF on a dry weight basis, is selected from about the following ratios: 99:1, 95:5, 90:10, 85:15, 80:20, 75:25, 70:30, 65:35, 60:40, 55:45, 50:50, 45:55, 40:60, 35:65, 30:70, 25:75, 20:80, 15:85, 10:90, 5:95 and 1:99, or any combination of any two of these values. Alternatively where the ratio of Bt to CRIP, Bt to ICK, Bt to non-ICK CRIP, Bt to TMOF, and TMOF, and sea anemone on a on a dry weight basis, is selected from about the following ratios: 50:50, 45:55, 40:60, 35:65, 30:70, 25:75, 20:80, 15:85, 10:90, 5:95, 1:99, 0.5:99.5, 0.1:99.9 and 0.01:99.99 or any combination of any two of these values. Alternatively where ratio of Bt to CRIP, Bt to ICK, Bt to non-ICK CRIP, Bt to TMOF, or Bt to ICK and TMOF, and sea anemone peptides are derived from more than 1 different types or bacterial strain origins of either one or both of Bt and ICK peptides. Alternatively where the Bt, ICK, non-ICK CRIP, sea anemone peptides and TMOF peptides are derived from between 2 and 5 different types or bacterial strains origins of either one or both of Bt, ICK, non-ICK CRIP, sea anemone peptides and TMOF peptides are derived from between 2 and 5 different strains. Alternatively where either or both of the Bt, ICK, non-ICK CRIP, sea anemone peptides and TMOF peptides are derived from 2 to 5 different types or bacterial strain origins of either one or all of Bt, ICK, non-ICK CRIP, sea anemone peptides and TMOF peptides. Alternatively where either or both of the Bt, ICK, non-ICK CRIP, sea anemone peptides and TMOF peptides are encoded by from 2 to 15 different types or bacterial strain origins of either one or all of Bt, ICK, non-ICK CRIP, sea anemone peptides and TMOF peptides. Alternatively where one or all of the Bt, ICK, non-ICK CRIP, sea anemone peptides and TMOF peptides are derived from 2 to 15 different types or bacterial strain origins of either one or all of Bt, ICK, and TMOF peptides and at least one strain of either Bt, ICK, non-ICK CRIP, sea anemone peptides and TMOF peptides or both Bt, ICK, non-ICK CRIP, sea anemone peptides and TMOF peptides and Bt and ICK, Bt and TMOF, or Bt and ICK+TMOF peptides are encoded by more than one copy of the Bt or ICK genes. Alternatively where either or both of the Bt, CRIP, ICK, non-ICK CRIP, sea anemone peptides and TMOF peptides are derived from 2 to 15 strains or bacterial types of Bt and/or ICK, non-ICK CRIP, sea anemone peptides and TMOF peptides with all the strains of Bt and/or ICK peptides contributing more than at least 1% of each strain type to said composition.

[0711] We describe a composition of Bt and ICK, non-ICK CRIP, sea anemone peptides and TMOF peptides of numbers 1-9 where the total concentration of Bt and CRIP peptide in the mixture is selected from the following percent concentrations: 1, 5, 10, 15, 20, 25, 30, 35, 40, 45, 50, 55, 60, 65, 70, 75, 80, 85, 90, 95 or 99%, or any range between any two of these values, and the remaining percentage of the mixture is comprised of excipients. We describe a composition wherein the insecticidal combination peptide is produced using a genetic cassette that further comprises an ERSP (Endoplasmic Reticulum Signal Peptide) operably linked to the insecticidal CRIP peptide, wherein said ERSP is linked at the N-terminal of the insecticidal CRIP peptide. We describe a composition wherein the insecticidal combination peptide is produced using a genetic cassette that further comprises an ERSP (Endoplasmic Reticulum Signal Peptide) operably linked to the insecticidal ICK peptide, wherein said ERSP is linked at the N-terminal of the insecticidal CRIP peptide, wherein the ERSP is BAAS. We describe a composition wherein said combination peptide is produced using a genetic cassette that further comprises a dipeptide operably linked to the insecticidal CRIP peptide, wherein said dipeptide is linked at the N-terminal of the insecticidal CRIP peptide; and wherein the dipeptide is comprised of one nonpolar amino acid on the N-terminal of the dipeptide and one polar amino acid on the C-terminal of the dipeptide. We describe a composition wherein said dipeptide is glycine-serine.

[0712] We describe a composition wherein the insecticidal CRIP peptide is any insecticidal peptide that inhibits both voltage-gated Calcium channels and Calcium-activated potassium channels in insects, and wherein the insecticidal CRIP peptide origins from any species of Australian Funnel-web spider, and wherein said spider is selected from the Australian Funnel-web spiders of genus Atrax or Hadronyche, and wherein said spider is selected from the Australian Funnel-web spiders of genus Hadronyche, and wherein said spider is selected from the Australian Blue Mountains Funnel-web, Hadronyche versuta, and wherein the insecticidal CRIP peptide is Hybrid-ACTX-Hv1a, and wherein said insecticidal CRIP peptide contains 20-100 amino acids and 2-4 disulfide bonds, wherein said insecticidal CRIP peptide is any insecticidal peptide with at least 50%, 55%, 60%, 65%, 70%, 75%, 80%, 85%, 90%, 95%, 96%, 97%, 98%, or 99% or greater sequence identity to any of the peptides in the sequence listing.

[0713] We describe insecticidal CRIP peptide is from Bt protein and where the Bt protein is a Cry or Cyt protein, or selected from the group consisting of a Cry1, Cry3, TIC851, CryET70, Cry22, TIC901, TIC201, TIC407, TIC417, a binary insecticidal protein CryET80, and CryET76, a binary insecticidal protein TIC100 and TIC101, a combination of an insecticidal protein ET29 or ET37 with an insecticidal protein TIC810 or TIC812 and a binary insecticidal protein PS149B1. We describe Bt protein selected from a Cry protein, a Cry1A protein or a Cry1F protein. We describe wherein said Bt protein is a combination Cry1F-Cry1A protein, Dipel or Thuricide and where the Bt protein is derived from Bacillus thuringiensis kurstaki.

[0714] We describe compositions comprising the nucleotides of a PFIP such as Bt (Bacillus thuringiensis) protein; and a CRIP such as an insecticidal ICK (Inhibitor Cystine Knot) peptide, or a Non-ICK peptide; in a transformed plant or plant genome; and where the ratio of Bt to ICK, on a dry weight basis, is selected from about the following ratios: 99:1, 95:5, 90:10, 85:15, 80:20, 75:25, 70:30, 65:35, 60:40, 55:45, 50:50, 45:55, 40:60, 35:65, 30:70, 25:75, 20:80, 15:85, 10:90, 5:95 and 1:99, or any combination of any two of these values, or where the composition of number 33, in a transformed plant or plant genome and wherein the ratio of Bt to ICK, on a dry weight basis, is selected from about the following ratios: 0:50, 45:55, 40:60, 35:65, 30:70, 25:75, 20:80, 15:85, 10:90, 5:95, 1:99, 0.5:99.5, 0.1:99.9 and 0.01:99.99 or any combination of any two of these values.

[0715] We describe a composition where either or both of the encoded Bt and ICK peptides are derived from more than 1 different type or bacterial strain origin of Bt or ICK peptides, where either or both of the encoded Bt and ICK peptides are derived from between 2 and 5 different type or bacterial strain origin of either Bt or ICK peptides or both Bt and ICK peptides are derived from between 2 and 5 different types or strain origins, where either or both of the encoded Bt and ICK peptides are derived from 2 to 15 different type or bacterial strain origins of either or both of Bt and ICK peptides and at least one strain of either Bt or ICK or both Bt and ICK peptides encoded by more than one copy of the Bt or ICK genes, where either or both of the encoded Bt and ICK peptides are derived from more than one different type or bacterial strain origin of Bt and/or ICK peptides where all the strains of Bt and/or ICK peptides contribute more than at least 1% of each strain type to said composition, where either or both of the encoded Bt and ICK peptides are derived from 2 to 5 different type or bacterial strain origins of either or both of Bt and ICK peptides and at least one strain of either Bt or ICK or both Bt and ICK peptides encoded by more than one copy of the Bt of ICK genes.

[0716] We describe a composition where the total concentration of transgenically expressed Bt and ICK peptide resulting from the mixture is selected from the following percent concentrations: 1, 5, 10, 15, 20, 25, 30, 35, 40, 45, 50, 55, 60, 65, 70, 75, 80, 85, 90, 95 or 99%, or any range between any two of these values, and the remaining percentage of the mixture is comprised of excipients. We describe a composition where the insecticidal combination peptide is produced using a genetic cassette that further comprises an ERSP (Endoplasmic Reticulum Signal Peptide) operably linked to the insecticidal ICK peptide, wherein said ERSP is linked at the N-terminal of the insecticidal ICK peptide, and where the insecticidal combination peptide is produced using a genetic cassette that further comprises an ERSP (Endoplasmic Reticulum Signal Peptide) operably linked to the insecticidal CRIP peptide, wherein said ERSP is linked at the N-terminal of the insecticidal CRIP peptide, wherein the ERSP is BAAS.

[0717] We describe a transgenic plant incorporating and expressing the combination peptides disclosed herein where said combination peptide is produced using a genetic cassette that further comprises nucleotides expressing a dipeptide operably linked to the insecticidal CRIP (peptide), wherein said dipeptide is encoded so that it is covalently linked at the N-terminal of the insecticidal CRIP; and wherein the dipeptide is comprised of one nonpolar amino acid on the N-terminal of the dipeptide and one polar amino acid on the C-terminal of the dipeptide. We describe a transgenic plant wherein the transformed peptide includes a dipeptide with an N terminal glycine-serine. We describe transgenic plant wherein the insecticidal peptides expressed are any insecticidal peptide combination of CRIP and PFIP (or Bt peptides) that allows the peptide to both enter the gut and then inhibits both voltage-gated Calcium channels and Calcium-activated potassium channels in insects.

[0718] We describe a transgenic plant wherein the recombinantly produced insecticidal CRIP peptide is derived from an Australian Funnel-web spider or sea anemone and we describe and provide either real or notional examples of transformed plants, transformed with a CRIP from a spider is selected from the Australian Funnel-web spiders of genus Atrax or Hadronyche or a sea anemone is selected from Anemonia viridis. The transgenic plant can have insecticidal ICK peptide expressed that is Hybrid-ACTX-Hv1a. The CRIP can be an ICK or Non-ICK that when expressed contains 20-100 amino acids and 2-4 disulfide bonds. The PIP peptides can have at least 50%, 55%, 60%, 65%, 70%, 75%, 80%, 85%, 90%, 95%, 96%, 97%, 98%, or 99% or greater sequence identity to SEQ ID NO: 33 and or peptide selected from SEQ ID NOs: 33-1032.

[0719] We describe a transgenic plant wherein the Bt protein is any insecticidal Bt protein and where the Bt protein is a Cry or Cyt protein, and where the Bt protein is selected from the group consisting of a Cry1, Cry3, TIC851, CryET70, Cry22, TIC901, TIC201, TIC407, TIC417, a binary insecticidal protein CryET80, and CryET76, a binary insecticidal protein TIC100 and TIC101, a combination of an insecticidal protein ET29 or ET37 with an insecticidal protein TIC810 or TIC812 and a binary insecticidal protein PS149B1 and where the Bt protein is selected from a Cry protein, a Cry1A protein or a Cry1F protein, and where the Bt protein is a combination Cry1F-Cry1A protein, and/or Dipel and or Thuricide.

[0720] We describe a transgenic plant wherein the average concentration of Bt and ICK/Non-ICK peptide, in an average leaf of a transformed plant is about: 1, 5, 10, 15, 20, 25, 30, 35, 40, 45, 50, 55, 60, 65, 70, 75, 80, 85, 90, 95 or 99% of total recoverable soluble protein, or any range between any two of these values, and where the transformed plant expressing the peptides properly folded toxic peptides in the transformed plant, and where it causes the accumulation of the expressed and properly folded toxic peptides in said plant and to cause an increase in the plant's yield or resistance to insect damage. We describe these compositions and procedures to control insects.

[0721] We describe expression cassettes comprising any of the nucleotides which express any peptides mentioned here. We describe a functional expression cassette incorporated into a transformed plant, comprising nucleotides that code for any of the peptides disclosed herein or that could be made by one skilled in the art given the teaching disclosed herein. We describe procedures for the generation of transformed plants having or expressing any of the combination peptides described herein. We describe a plant made by any of the products and processes described herein.

[0722] We describe the use of any of the peptides or nucleotides described herein, to make a plant or transform these peptides or nucleotides into a plant, and methods and techniques for generating these proteins in plants and/or expression cassettes comprising any of the peptides and methods to transform them into a plant genome and any method of using, making, transforming any of the described peptides or nucleotides into a plant and methods and techniques for generating transformed plants having or expressing any of the peptides and functional expression cassettes in plants comprising any of the disclosed peptides and their corresponding nucleotides and any plants made by the products and processes described herein.

[0723] We describe a chimeric gene comprising a promoter active in plants operatively linked to the nucleic acids or expression cassettes as described herein and the methods of making, producing, or using the combination of genes described herein. We describe a recombinant vector comprising the combination of genes described herein. We describe a method of making, producing, or using the recombinant vectors, a transgenic host cell comprising the combination of genes, the transgenic host cell which is a transgenic plant cell, the transgenic plant and transgenic plants which are corn, soybean, cotton, rice, sorghum, switchgrass, sugarcane, alfalfa, potatoes or tomatoes, and the seeds for these and other plants, and where the seed comprises a chimeric gene.

[0724] We describe methods of controlling an insect or the locus of an insect comprising: applying a PFIP, like Bt (Bacillus thuringiensis) protein to said insect; followed with an application of any or any combination of the following: a cysteine rich insecticidal peptide (CRIP) to said insect and in combination or in the alternative, applying an insecticidal ICK (Inhibitor Cystine Knot) peptide to said insect and in combination or in the alternative, applying a Non-ICK CRIP peptide to said insect and in combination or in the alternative, applying a TMOF peptide to said insect, applying a sea anemone peptide to said insect.

[0725] We explain that Bt protein and the insecticidal CRIP, ICK and or TMOF peptide are applied such that they work together, but they do not have to be applied at the same time. The PFIP like a Bt protein and the insecticidal CRIP, ICK and or TMOF peptide can be are applied concurrently or sequentially.

[0726] We explain the amounts as follows: the ratio of Bt to CRIP, Bt to ICK, Bt to non-ICK CRIP, Bt to TMOF, or Bt to ICK and TMOF; on a dry weight basis, is selected from about the following ratios: 99:1, 95:5, 90:10, 85:15, 80:20, 75:25, 70:30, 65:35, 60:40, 55:45, 50:50, 45:55, 40:60, 35:65, 30:70, 25:75, 20:80, 15:85, 10:90, 5:95 and 1:99, or any combination of any two of these values; alternatively, the ratio of Bt to CRIP, Bt to ICK, Bt to non-ICK CRIP, Bt to TMOF, or Bt to ICK and TMOF; on a on a dry weight basis, is selected from about the following ratios: 50:50, 45:55, 40:60, 35:65, 30:70, 25:75, 20:80, 15:85, 10:90, 5:95, 1:99, 0.5:99.5, 0.1:99.9 and 0.01:99.99 or any combination of any two of these values.

[0727] We explain both or all of the Bt+CRIP; Bt+ICK, Bt+Non-ICK CRIP, Bt+TMOF or Bt+ICK+TMOF; are derived from more than 1 different types or bacterial strain origins of Bt, o ICK, and TMOF peptides and or both of the Bt and CRIP, ICK, non-ICK CRIP, Bt and TMOF or Bt and ICK+TMOF; Bt+sea anemone peptides are derived from between 2 and 5 different types or bacterial strain origins of either one, two or more of Bt, CRIP, ICK, non-ICK CRIP, sea anemone peptides or TMOF peptides, and or either one, two or all Bt, ICK and TMOF peptides are derived from 2 to 15 different types or bacterial strain origins of either or both of Bt and ICK peptides and at least one strain of either one, two or all of Bt, CRIP, ICK, non-ICK CRIP, sea anemone peptides or TMOF peptides are encoded by more than one copy one, two or all of Bt, CRIP, ICK, non-ICK CRIP, sea anemone peptides or TMOF genes.

[0728] We explain that one, two or all Bt, ICK and TMOF peptides are derived from more than 1 different types or bacterial strain origins of one, two or all Bt, ICK and TMOF peptides with all the strains of one, two or all Bt, ICK and TMOF peptides contributing more than at least 1% of the peptides from each strain type in said composition. The total concentration of Bt and CRIP peptide in the mixture is selected from the following percent concentrations: 1, 5, 10, 15, 20, 25, 30, 35, 40, 45, 50, 55, 60, 65, 70, 75, 80, 85, 90, 95 or 99%, or any range between any two of these values, and the remaining percentage of the mixture is comprised of excipients.

[0729] We either provide or provide enough information that one skilled in the art could make a formulation comprising: a PFIP such as a Bt protein; and a CRIP such as an insecticidal ICK or Non-ICK peptide; and/or a TMOF peptide. We explain such formulations could be made using a polar aprotic solvent and a polar protic solvent and further comprising water. In some formulations the polar aprotic solvent is present in an amount of 1-99 wt %, the polar protic solvent is present in an amount of 1-99 wt %, and the water is present in an amount of 0-98 wt %, and it can further comprise MSO.

### PART III. EXAMPLES

### Example 1

[0730] Foliar Bioassay Using SDP 1234604 and 1234605 Against Spodoptera exigua on Romaine Lettuce

[0731] Purpose: The purpose of this experiment is designed to determine the percent mortality which occurs against S. exigua when SDP 1234604 (wp formulation) and 605 (pre-gran formulation) are sprayed against 1st, 2nd, 3rd and 4th Instar larvae in a foliar leaf disk bioassay.

[0732] Assay Preparation and Treatment Formulation: S. exigua eggs were received from Benzon Research. Eggs were placed at 10° C. in the wine cooler for two days then moved to the VWR Low Temperature Incubator set at 28° C. and 2-30% Relative Humidity on a rack under LED lights, until freshly hatched neonate were ˜24 hr old for the first experiment. Mud Lake Farms Lettuce was received on Jul. 9, 2012 and stored at 4° C. in a refrigerator until used. For each instar, larvae were placed on mud lakes farms lettuce after 24 hours in the incubator. Lettuce leaves were cut and placed into a medium square polyethylene container and larvae were tapped into the container. After 24 hours, larvae were removed from the old lettuce and fresh lettuce was replaced so that larvae were not reared on less than superior tissue. This occurred once a day, for three days, until larvae were 96 hours old. Lettuce leaves were cut into disks using a 2¼ inch arch which has been sanitized with 70% ethanol and cleaned to remove any leaf tissue from previous assays. Leaf disks were punched on a true bamboo cutting board. A very dilute 12 ppm bleach solution ( 1/500th dilution of 6ppt hypochlorite {Clorox Bleach} Stock) was used to sanitize the leaf tissue without damaging leaf disks before the quadruple rinse. Leaf disks were subjected to the 12 ppm bleach treatment by placing the cut leaf disk in a 12 ppm solution of bleach in a large rectangular polyethylene container (covered with a lid) and shaking at 3500 rpm on an orbital shaker for 1.5 minutes. Bleach solution was then drained from the bin and leaves were rinsed in bins with dH2O four times to remove residual bleach with slight agitation in diH2O on the orbital shaker. Leaf disks were placed onto the paper towels and covered with additional paper towels so that they do not dry out. Only the flattest, circular and uniform disks were then hand dried with Kimwipes to remove any remaining water and placed into labeled Tupperware containers abaxial side up for spraying. During this time, formulations were made (as described in the table that follows) for the spray solutions of spray dried powders on the leaf disks in 50 mL Falcon tube being sure to fill tubes with deionized H2O before adding the precisely massed amount of spray dried powders. Spraying was performed in the Labconco fume hood in E207 starting with the ventral side of the leaf disk. For spraying, a double action, internal mix airbrush (Paasch Airbrush Company, Chicago Ill.) with the airline set at a rate of 200 μL/second (20 psi). Leaf disks were sprayed in a circular fashion with the airbrush perpendicular to the leaf surface so that a fine mist covered the entire leaf surface evenly (˜3-4 seconds). Between each treatment spray, the cup containing spray solution was rinsed with dH2O to remove any residues from previous treatments. After spraying, drying was allowed for one hour then disks were flipped so their adaxial side was now orientated facing up in the Tupperware Container and sprayed in the same manner. After spraying the adaxial side, an hour was allowed for drying and leaf disks were placed in labeled petri dishes with 2 90 mm Whatman 3 Qualitative Filter Papers (GE Healthcare UK Limited, Amersham Place Little Chalfont, Buckinghamshire, HP7 9NA, UK) at the bottom that have been wetted with 4 mL of diH2O using a Eppendorf Repeater Plus and a 25 mL tip. Petri dishes were covered and randomized before ˜7-9 freshly hatched neonates S. exigua were applied to each leaf disk using a #0 fine haired brush by obtaining a white board and emptying a container of 24, 48, 72 or 96 hr neonates onto it. Plates were sealed with parafilm and placed randomly on the rack for statistical purposes at 27° C. The assay was scored over the following day at 18, 24, 40 and 48 hours by observing mortality and noting any differences between untreated and treated leaves.

[0733] FIG. 19 shows the percent mortality results of four experiments recorded for each experiment at 18, 24, 40 and 48 hours. The non-spray dried control treatment showed the lowest average mortality of any treatments. The majority of insect mortality is observed at the 18 hour scoring and additional mortality is observed at 40 and 48 hours shown by the 40 and 48 hour scoring. Healthy insects have noticeable green, chlorophyll like color, fast evasion response when prodded with paint brush and average growth for 48 hours. Percent mortality results of 72 and 96 hour larvae are significantly reduced compared to the 24 and 48 hour old larvae. Clearly, both Bt protein and Hybrid peptide treatments alone are ineffective in controlling older insects.

### Example 2

[0734] Foliar Bioassay Using SDP 1234605 Against Spodoptera exigua on Mud Lakes Farms Romaine Lettuce.

[0735] Purpose: The purpose of this experiment is designed to determine the percent mortality which occurs against S. exigua when SDP 1234605 is sprayed against 72 hour old larvae in a foliar leaf disk bioassay and when Dipel DF is co-sprayed with SDP 1234605.

[0736] Assay Preparation and Treatment Formulation: See preparation in Example 1. S. exigua eggs were received from Benzon Research. Petri dishes were covered and randomized before ˜7-9 freshly hatched neonates S. exigua were applied to each leaf disk using a #0 fine haired brush by obtaining a white board and emptying a container of 72 hr old larvae onto it. Plates were sealed with parafilm and placed randomly on the rack for statistical purposes at 27° C. The assay was scored over the following day at 18, 24 and 48 hours by observing mortality and noting any differences between untreated and treated leaves.

[0737] FIG. 20 shows a column graph Example 2 data at 18, 24 and 48 hours. Individually 10 parts per thousand (ppt) of Hybrid peptide in formulation '605 and Dipel at 300 parts per million (ppm) show little improvement over either the untreated control or surfactant mortalities. However, when combined the resultant mortality at 48 hours of 84.4% surprisingly exceeds that which would be expected from the additive effects of the individual treatments (29.1%). The insecticidal activity of the individual components is at least 2.9 fold (84.4/29.1). It is unexpected that an insecticidal protein that kills through sepsis would be synergistic with an insecticidal peptide that modulates ion channels in the CNS.

### Example 3

[0738] Additive and/or Synergistic Effects of Combinations of Bacillus thuringiensis (Bt) Proteins and the Av2 Peptide from Sea Anemones.

[0739] We used the Bt product: Dipel DF which is commercially available and commercially available Av2, a toxic sea anemone peptide.

[0740] Methods: Small leaf disks (˜2 cm) were cut into the inner leaves of cabbage purchased from a local grocery store. Disks were dipped into 400 μL of treatment and placed on 4.25 cm #4 filter disks (Whatman) in the bottom of ˜4.5 cm condiment cups. Four disks were prepared per treatment. 75 μL of water was applied to a second smaller 3.2 cm #1 filter disk (Whatman) atop the larger filter disk. Leaf disks were allowed to dry approximately ten minutes before adding four 120 hr old Cry1a resistant Plutella xylostella per leaf disk. Condiment cups were sealed with non-perforated lids. Treatments were placed in the incubator and scored for mortality and feeding damage at 24 and 48 hrs. Due to large consumption of leaf disks in many treatments, an additional 3.2 cm untreated leaf disk was added at 24 hr to ensure larval starvation did not occur.

[0741] At 24 and 48 hours, pictures of leaf disks were taken using an Iphone 4S (Apple Inc.), and saved. Individual leaf disk photos were cropped from the group treatment photo and assigned random numbers. Using the program ImageJ, leaf area eaten was calculated. The image was opened in imageJ and the scale in the photo was set. To set the scale, a known distance in the photo in centimeters (cm) was drawn using the segment line tool and measured in units of pixels. For this experiment, the known diameter of filter paper disk is 1.5 cm for #1 filter disk and 4.5 cm for the #4 Whatman Filter disk. Using this known length in cm, pixel units are converted in the image to centimeters. Once the scale is set, a freehand selection tool is used to draw around the area where leaf tissue remains. This process was repeated for all photos being sure to log area calculated by image J in the lab notebook. For this experiment the control area of uneaten leaf disk is 2.54 cm² and calculations were made to determine % area eaten.

[0742] Treatments:

[0743] 150 PPM Dipel DF: 200 μL 300 PPM Dipel DF+200 μL water

[0744] 1 PPT Av2: 0.1 mg Av2 in 100 μL water (combined four vials 1 PPT Av2 for necessary 400 μL treatments)

[0745] 150 PPM Dipel DF+1PPT Av2: 100 μL 150 PPM Dipel DF was added to 0.1 mg Av2 (four vials were combined for necessary 400 μL treatment)

[0746] FIG. 21 shows the percent feeding damage resulting from Bt protein resistant diamondback moth larvae (120 hrs old) on cabbage leaf disks. Scoring at both 24 hours and 48 hours shows significant improvement over treatment with Dipel alone. While these insects are resistant to Bt, they do still feed to a limited extent without mortality. The combination treatment results in significantly improved protection of the foliar material. Further, treatment with Av2 alone has no effect on feeding damage and it is only in combination with the Bt protein that its effect is made apparent. This is consistent with increased bioavailability of Av2 made possible by the Bt protein.

### Example 4

[0747] Foliar Bioassay Using SDP 1234609 and DiPel DF on Earthbound Farms Romaine Lettuce

[0748] Purpose: The purpose of this experiment is to determine the percent mortality which occurs against Bt resistant (HD-1) P. xylostella when SDP 1234609 is sprayed against 120 hour old larvae in a foliar leaf disk bioassay and when Dipel DF is co-sprayed with SDP 1234609.

[0749] Assay Preparation and Treatment Formulation: See preparation in Example 1.

[0750] FIG. 22 shows a column graph Example 4 data at 24 and 48 hours. Individually 1 parts per thousand (ppt) of Hybrid peptide in formulation '609 and Dipel at 150 parts per million (ppm) show little improvement over either the untreated control or surfactant mortalities. However, when combined the resultant mortality at 48 hours of 62.5% surprisingly exceeds that which would be expected from the additive effects of the individual treatments (21.8%). The synergy of the individual components is at least 2.86 fold (62.5/21.8). Again, it is unexpected that an insecticidal protein that kills through sepsis would be synergistic with an insecticidal peptide that modulates ion channels in the CNS.

### PART IV. INSECTICIDAL COMBINATIONS

### Definitions

[0751] “5′- and 3′-homology arms” or “5′ and 3′ arms” or “left and right arms” refers to the polynucleotide sequences in a vector and/or targeting vector that homologously recombine with the target genome sequence and/or endogenous gene of interest in the host organism in order to achieve successful genetic modification of the host organism's chromosomal locus.

[0752] “Γ-CNTX-Pn1a” or “γ-CNTX-Pn1a” or “gamma-CNTX-Pn1a” or “gamma” refers to an insecticidal neurotoxin derived from the Brazilian armed spider, Phoneutria nigriventer. Γ-CNTX-Pn1a targets the N-methyl-D-aspartate (NMDA)-subtype of ionotropic glutamate receptor (GRIN), and sodium channels.

[0753] “ω/κ-HXTX-Hv1a” or “omega/kappa-HXTX-Hv1a,” refers to the insecticidal toxin derived from the Australian Blue Mountain Funnel-web Spider, Haydronyche versuta. ω/κ-HXTX-Hv1a is a positive allosteric modulators of the nicotinic acetylcholine receptor, and may also be a dual antagonist to insect voltage-gated Ca²⁺ channels and voltage-gated K⁺ channels. See Chambers et al., Insecticidal spider toxins are high affinity positive allosteric modulators of the nicotinic acetylcholine receptor. FEBS Lett. 2019 June; 593(12):1336-1350; and Windley et al., Lethal effects of an insecticidal spider venom peptide involve positive allosteric modulation of insect nicotinic acetylcholine receptors. Neuropharmacology. 2017 December; 127:224-242, the disclosures of which are incorporated herein by reference in their entireties. As used herein, ω/κ-HXTX-Hv1a is synonymous with “U+2 peptide,” “U+2 protein,” “U+2 toxin,” “U+2,” and “U+2-ACTX-Hv1a.”

[0754] “Agent” can refer to one or more chemical substances, molecules, nucleotides, polynucleotides, peptides, polypeptides, proteins, poisons, insecticides, pesticides, organic compounds, inorganic compounds, prokaryote organisms, or eukaryote organisms, and/or any subsequent agent produced therefrom.

[0755] “Arachnid” refers to a class of arthropods. For example in some embodiments, arachnid can mean spiders, scorpions, ticks, mites, harvestmen, or solifuges.

[0756] “Av2” or “ATX-II” or “neurotoxin 2” or “Anemonia viridis toxin 2” or δ-AITX-Avd1c” refers to a toxin isolated from the venom of Anemonia sulcata. One example of an Av2 polypeptide is a polypeptide having the amino acid sequence of SEQ ID NO: 1779.

[0757] “Av3” refers to a polypeptide isolated from the sea anemone, Anemonia viridis, which can target receptor site 3 on α-subunit III of voltage-gated sodium channels. One example of an Av3 polypeptide is an Av3 polypeptide having the amino acid sequence of SEQ ID NO: 1780 (NCBI Accession No. P01535.1).

[0758] “AVP” or “Av3 variant polypeptides” refers to an Av3 polypeptide sequence and/or a polypeptide encoded by a variant Av3 polynucleotide sequence that has been altered to produce a non-naturally occurring polypeptide and/or polynucleotide sequence.

[0759] “bp” or “base pair” refers to a molecule comprising two chemical bases bonded to one another forming a. For example, a DNA molecule consists of two winding strands, wherein each strand has a backbone made of an alternating deoxyribose and phosphate groups. Attached to each deoxyribose is one of four bases, i.e., adenine (A), cytosine (C), guanine (G), or thymine (T), wherein adenine forms a base pair with thymine, and cytosine forms a base pair with guanine.

[0760] “Bt-resistant” or “Bt-resistance” or “Bt-resistant insect” or “Bacillus thuringiensis-toxin-resistant insects” refers to a heritable change in the sensitivity of a pest population that is reflected in the repeated failure of a product (e.g., Bt) to achieve the expected level of control when used against that pest species.

[0761] “CEW” refers to Corn earworm.

[0762] “Cone shell” or “cone snails” or “cones” refers to organisms belonging to the Conus genus of predatory marine gastropods. For example, in some embodiments, a cone shell can be one of the following species: Conus amadis; Conus catus; Conus ermineus; Conus geographus; Conus gloriamaris; Conus kinoshitai; Conus magus; Conus marmoreus; Conus purpurascens; Conus stercusmuscarum; Conus striatus; Conus textile; or Conus tulipa.

[0763] “Conotoxin” refers to the toxins isolated from cone shells that act by interfering with neuronal communication. For example, in some embodiments, a conotoxin can be an α-, ω-, μ-, δ-, or κ-conotoxins. Briefly, the α-conotoxins (and αA-&φ-conotoxins) target nicotinic ligand gated channels; ω-conotoxins target voltage-gated calcium channels; μ-conotoxins target the voltage-gated sodium channels; δ-conotoxins target the voltage-gated sodium channel; and κ-conotoxins target the voltage-gated potassium channel.

[0764] “Homologous” refers to Homologous refers to the sequence similarity or sequence identity between two polypeptides or between two nucleic acid molecules. When a position in both of the two compared sequences is occupied by the same base or amino acid monomer subunit, e.g., if a position in each of two DNA molecules is occupied by adenine, then the molecules are homologous at that position. The percent of homology between two sequences is a function of the number of matching or homologous positions shared by the two sequences divided by the number of positions compared ×100. Homologous refers to the sequence similarity between two polypeptide molecules or between two nucleic acid molecules. When a position in both of the two compared sequences is occupied by the same base or amino acid monomeric subunit, e.g., if a position in each of two DNA molecules is occupied by adenine, then the molecules are homologous at that position. The homology between two sequences is a function of the number of matching or homologous positions shared by the two sequences. For example, if 6 of 10 of the positions in two sequences are matched or homologous then the two sequences are 60% homologous. By way of example, the DNA sequences ATTGCC and TATGGC share 50% homology.

[0765] The term “homology,” when used in relation to nucleic acids, refers to a degree of complementarity. There may be partial homology, or complete homology and thus identical. “Sequence identity” refers to a measure of relatedness between two or more nucleic acids, and is given as a percentage with reference to the total comparison length. The identity calculation takes into account those nucleotide residues that are identical and in the same relative positions in their respective larger sequences.

[0766] “Identity” refers to a relationship between two or more polypeptide sequences or two or more polynucleotide sequences, as determined by comparing said sequences. The term “identity” also means the degree of sequence relatedness between polypeptide or polynucleotide sequences, as the case may be, as determined by the match between strings of such sequences. “Identity” and “similarity” can be readily calculated by any one of the myriad methods known to those having ordinary skill in the art, including but not limited to those described in: Computational Molecular Biology, Lesk, A. M., ed., Oxford University Press, New York, 1988; Biocomputing: Informatics and Genome Projects, Smith, D. W., ed., Academic Press, New York, 1993; Computer Analysis of Sequence Data, Part 1, Griffin, A. M., and Griffin, H. G., eds., Humana Press, New Jersey, 1994, Sequence Analysis in Molecular Biology, von Heinje, G., Academic Press, 1987; and Sequence Analysis Primer, Gribskov, M. and Devereux, J., eds., M Stockton Press, New York, 1991; and Carillo, H., and Lipman, D., SIAM J. Applied Math., 48: 1073 (1988), the disclosures of which are incorporated herein by reference in their entireties. Furthermore, methods to determine identity and similarity are codified in publicly available computer programs. For example in some embodiments, methods to determine identity and similarity between two sequences include, but are not limited to, the GCG program package (Devereux, J., et al., Nucleic Acids Research 12(1): 387 (1984)), BLASTP, BLASTN, and FASTA (Altschul, S. F. et al., J. Molec. Biol. 215: 403-410 (1990). The BLAST X program is publicly available from NCBI and other sources (BLAST Manual, Altschul, S., et al., NCBI NLM NIH Bethesda, Md. 20894; Altschul, S., et al., J. Mol. Biol. 215: 403-410 (1990), the disclosures of which are incorporated herein by reference in their entireties.

[0767] “in vivo” refers to the natural environment (e.g., an animal or a cell) and to processes or reactions that occur within a natural environment.

[0768] “Kappa-ACTX peptide” refers to an excitatory toxin that inhibits insect calcium-activated potassium (KCa) channels (Slo-type). As used herein, “Kappa-ACTX peptide” can refer to peptides isolated from the Australian Blue Mountains Funnel-web Spider, Haydronyche versuta, or variants thereof.

[0769] “kb” refers to kilobase, i.e., 1000 bases. As used herein, the term “kb” means a length of nucleic acid molecules. For example, 1 kb refers to a nucleic acid molecule that is 1000 nucleotides long. A length of double-stranded DNA that is 1 kb long, contains two thousand nucleotides (i.e., one thousand on each strand). Alternatively, a length of single-stranded RNA that is 1 kb long, contains one thousand nucleotides.

[0770] “kDa” refers to kilodalton, a unit equaling 1,000 daltons; a “Dalton” or “dalton” is a unit of molecular weight (MW).

[0771] “LD₂₀” refers to a dose required to kill 20% of a population.

[0772] “MOA” refers to mechanism of action.

[0773] “Molecular weight (MW)” refers to the mass or weight of a molecule, and is typically measured in “daltons (Da)” or kilodaltons (kDa). In some embodiments, MW can be calculated using sodium dodecyl sulfate polyacrylamide gel electrophoresis (SDS-PAGE), analytical ultracentrifugation, or light scattering. In some embodiments, the SDS-PAGE method is as follows: the sample of interest is separated on a gel with a set of molecular weight standards. The sample is run, and the gel is then processed with a desired stain, followed by destaining for about 2 to 14 hours. The next step is to determine the relative migration distance (Rf) of the standards and protein of interest. The migration distance can be determined using the following equation: Rf=(migration distance of the protein)/(Migration distance of the dye front). Next, the logarithm of the MW can be determined based on the values obtained for the bands in the standard; e.g., in some embodiments, the logarithm of the molecular weight of an SDS-denatured polypeptide and its relative migration distance (Rf) is plotted into a graph. After plotting the graph, interpolating the value derived will provide the molecular weight of the unknown protein band.

[0774] “NCBI” refers to the National Center for Biotechnology Information.

[0775] “Operable” refers to the ability to be used, the ability to do something, and/or the ability to accomplish some function or result. For example, in some embodiments, “operable” refers to the ability of a site-specific integration (SSI) sequence to knock-out a gene (e.g., Gal80 or ndt80), and/or knock-in a gene encoding a heterologous polypeptide of interest.

[0776] “Parasporal crystal toxin” refers to any of the peptides, polypeptides, and/or proteins that are part of the parasporal body or parasporal crystal, which is a bipyramidal crystal containing one or more peptides, polypeptides, and/or proteins. When the parasporal body or parasporal crystal is ingested by an insect, this toxin-containing parasporal crystal dissolves in the alkaline gut juices, followed by cleavage via midgut proteases of the protoxin, which yields an active peptide toxin, e.g., a δ-endotoxin.

[0777] “Pesticidally-effective amount” refers to an amount of the pesticide that is able to bring about death to at least one pest, or to noticeably reduce pest growth, feeding, or normal physiological development. This amount will vary depending on such factors as, for example, the specific target pests to be controlled, the specific environment, location, plant, crop, or agricultural site to be treated, the environmental conditions, and the method, rate, concentration, stability, and quantity of application of the pesticidally-effective polypeptide composition. The formulations may also vary with respect to climatic conditions, environmental considerations, and/or frequency of application and/or severity of pest infestation.

[0778] “Protein” has the same meaning as “Peptide” in this document.

[0779] “Ratio” refers to the quantitative relation between two amounts showing the number of times one value contains or is contained within the other.

[0780] “Sea anemone” refers to a group of marine animals of the order Actiniaria. Sea anemones are named after the anemone, which is a terrestrial flowering plant, due to colorful appearance many sea anemones possess. For example, in some embodiments, a sea anemone is one of the following species: Actinia equine; Anemonia erythraea; Anemonia sulcata; Anemonia viridis; Anthopleura elegantissima; Anthopleura fuscoviridis; Anthopleura xanthogrammica; Bunodosoma caissarum; Bunodosoma cangicum; Bunodosoma granulifera; Heteractis crispa; Parasicyonis actinostoloides; Radianthus paumotensis; or Stoichactis helianthus.

[0781] “Serovar” or “serotype” refers to a group of closely related microorganisms distinguished by a characteristic set of antigens. In some embodiments, a serovar is an antigenically and serologically distinct variety of microorganism

[0782] “sp.” refers to species.

[0783] “ssp.” or “subsp.” refers to subspecies.

[0784] The acronym “SSI” is context dependent. In some contexts, it can refer to “Site-specific integration,” which is used to refer to a sequence that will permit in vivo homologous recombination to occur. However, in other contexts, SSI can refer to “Surface spraying indoors,” which is a technique of applying a variable volume sprayable volume of an insecticide onto indoor surfaces where vectors rest, such as on walls, windows, floors and ceilings.

[0785] “var.” refers to varietas or variety. The term “var.” is used to indicate a taxonomic category that ranks below the species level and/or subspecies (where present). In some embodiments, the term “var.” represents members differing from others of the same subspecies or species in minor but permanent or heritable characteristics.

[0786] “Variant” or “variant sequence” or “variant peptide” refers to an amino acid sequence that possesses one or more conservative amino acid substitutions or conservative modifications. The conservative amino acid substitutions in a “variant” does not substantially diminish the activity of the variant in relation to its non-varied form. For example, in some embodiments, a “variant” possesses one or more conservative amino acid substitutions when compared to a peptide with a disclosed and/or claimed sequence, as indicated by a SEQ ID NO.

[0787] The present disclosure is performed without undue experimentation using, unless otherwise indicated, conventional techniques of molecular biology, microbiology, virology, recombinant DNA technology, solid phase and liquid nucleic acid synthesis, peptide synthesis in solution, solid phase peptide synthesis, immunology, cell culture, and formulation. Such procedures are described, for example, in Sambrook, Fritsch & Maniatis, Molecular Cloning: A Laboratory Manual, Cold Spring Harbor Laboratories, New York, Second Edition (1989), whole of Vols I, II, and III; DNA Cloning: A Practical Approach, Vols. I and II (D. N. Glover, ed., 1985), IRL Press, Oxford, whole of text; Oligonucleotide Synthesis: A Practical Approach (M. J. Gait, ed, 1984) IRL Press, Oxford, whole of text, and particularly the papers therein by Gait, pp 1-22; Atkinson et al, pp 35-81; Sproat et al, pp 83-115; and Wu et al, pp 135-151; 4. Nucleic Acid Hybridization: A Practical Approach (B. D. Hames & S. J. Higgins, eds., 1985) IRL Press, Oxford, whole of text; Immobilized Cells and Enzymes: A Practical Approach (1986) IRL Press, Oxford, whole of text; Perbal, B., A Practical Guide to Molecular Cloning (1984); Methods In Enzymology (S. Colowick and N. Kaplan, eds., Academic Press, Inc.), whole of series; J. F. Ramalho Ortigao, “The Chemistry of Peptide Synthesis” In: Knowledge database of Access to Virtual Laboratory website (Interactiva, Germany); Sakakibara, D., Teichman, J., Lien, E. Land Fenichel, R. L. (1976). Biochem. Biophys. Res. Commun. 73 336-342; Merrifield, R. B. (1963). J. Am. Chem. Soc. 85, 2149-2154; Barany, G. and Merrifield, R. B. (1979) in The Peptides (Gross, E. and Meienhofer, 3. eds.), vol. 2, pp. 1-284, Academic Press, New York. 12. Wiinsch, E., ed. (1974) Synthese von Peptiden in Houben-Weyls Metoden der Organischen Chemie (Muler, E., ed.), vol. 15, 4th edn., Parts 1 and 2, Thieme, Stuttgart; Bodanszky, M. (1984) Principles of Peptide Synthesis, Springer-Verlag, Heidelberg; Bodanszky, M. & Bodanszky, A. (1984) The Practice of Peptide Synthesis, Springer-Verlag, Heidelberg; Bodanszky, M. (1985) Int. J. Peptide Protein Res. 25, 449-474; Handbook of Experimental Immunology, Vols. I-IV (D. M. Weir and C. C. Blackwell, eds., 1986, Blackwell Scientific Publications); and Animal Cell Culture: Practical Approach, Third Edition (John R. W. Masters, ed., 2000); each of these references are incorporated herein by reference in their entireties.

[0788] Throughout this specification, unless the context requires otherwise, the word “comprise,” or variations such as “comprises” or “comprising,” will be understood to imply the inclusion of a stated step or element or integer or group of steps or elements or integers but not the exclusion of any other step or element or integer or group of elements or integers.

[0789] Exemplary PFIPs

[0790] In some embodiments, a PFIP can be a MTX2 toxin, e.g., a MTX2 toxin isolated from Lysinibacillus sphaericus.

[0791] In some embodiments, a PFIP can be a Bin-like toxin, e.g., a Bin-like toxin isolated from Lysinibacillus sphaericus.

[0792] In some embodiments, a PFIP can be a Bacillus thuringiensis subspecies. For example, in some embodiments, the Bacillus thuringiensis subspecies can be one of the following subspecies: aizawai; aizawai/pacificus; alesti; amagiensis; andalousiensis; argentinensis; asturiensis; azorensis; balearica; berliner; bolivia; brasilensis; cameroun; canadensis; chanpaisis; chinensis; colmeri; coreanensis; dakota; darmstadiensis; dendrolimus; entomocidus; entomocidus/subtoxicus; finitimus; fukuokaensis; galechiae; galleriae; graciosensis; guiyangiensis; higo; huazhongensis; iberica; indiana; israelensis; israelensis/tochigiensis; japonensis; jegathesan; jinghongiensis; kenyae; kim; kumamtoensis; kurstaki; kyushuensis; leesis; londrina; malayensis; medellin; mexicanensis; mogi; monterrey; morrisoni; muju; navarrensis; neoleonensis; nigeriensis; novosibirsk; ostriniae; oswaldocruzi; pahangi; pakistani; palmanyolensis; pingluonsis; pirenaica; poloniensis; pondicheriensis; pulsiensis; rongseni; roskildiensis; san diego; seoulensis; shandongiensis; silo; sinensis; sooncheon; sotto; sotto/dendrolimus; subtoxicus; sumiyoshiensis; sylvestriensis; tenebrionis; thailandensis; thompsoni; thuringiensis; tochigiensis; toguchini; tohokuensis; tolworthi; toumanoffi; vazensis; wratislaviensis; wuhanensis; xiaguangiensis; yosoo; yunnanensis; zhaodongensis; str. Al Hakam; or konkukian.

[0793] In some embodiments, a PFIP can be a Bacillus thuringiensis var. or varietas. For example, in some embodiments, a PFIP can be a Bacillus thuringiensis var. selected from the following group: Bacillus thuringiensis var. aizawai; Bacillus thuringiensis var. aizawai/pacificus; Bacillus thuringiensis var. alesti; Bacillus thuringiensis var. amagiensis; Bacillus thuringiensis var. andalousiensis; Bacillus thuringiensis var. argentinensis; Bacillus thuringiensis var. asturiensis; Bacillus thuringiensis var. azorensis; Bacillus thuringiensis var. balearica; Bacillus thuringiensis var. berliner; Bacillus thuringiensis var. bolivia; Bacillus thuringiensis var. brasilensis; Bacillus thuringiensis var. cameroun; Bacillus thuringiensis var. canadensis; Bacillus thuringiensis var. chanpaisis; Bacillus thuringiensis var. chinensis; Bacillus thuringiensis var. colmeri; Bacillus thuringiensis var. coreanensis; Bacillus thuringiensis var. dakota; Bacillus thuringiensis var. darmstadiensis; Bacillus thuringiensis var. dendrolimus; Bacillus thuringiensis var. entomocidus; Bacillus thuringiensis var. entomocidus/subtoxicus; Bacillus thuringiensis var. finitimus; Bacillus thuringiensis var. fukuokaensis; Bacillus thuringiensis var. galechiae; Bacillus thuringiensis var. galleriae; Bacillus thuringiensis var. graciosensis; Bacillus thuringiensis var. guiyangiensis; Bacillus thuringiensis var. higo; Bacillus thuringiensis var. huazhongensis; Bacillus thuringiensis var. iberica; Bacillus thuringiensis var. indiana; Bacillus thuringiensis var. israelensis; Bacillus thuringiensis var. israelensis/tochigiensis; Bacillus thuringiensis var. japonensis; Bacillus thuringiensis var. jegathesan; Bacillus thuringiensis var. jinghongiensis; Bacillus thuringiensis var. kenyae; Bacillus thuringiensis var. kim; Bacillus thuringiensis var. kumamtoensis; Bacillus thuringiensis var. kunthalanags3; Bacillus thuringiensis var. kunthalaRX24; Bacillus thuringiensis var. kunthalaRX27; Bacillus thuringiensis var. kunthalaRX28; Bacillus thuringiensis var. kurstaki; Bacillus thuringiensis var. kyushuensis; Bacillus thuringiensis var. leesis; Bacillus thuringiensis var. londrina; Bacillus thuringiensis var. malayensis; Bacillus thuringiensis var. medellin; Bacillus thuringiensis var. mexicanensis; Bacillus thuringiensis var. mogi; Bacillus thuringiensis var. monterrey; Bacillus thuringiensis var. morrisoni; Bacillus thuringiensis var. muju; Bacillus thuringiensis var. navarrensis; Bacillus thuringiensis var. neoleonensis; Bacillus thuringiensis var. nigeriensis; Bacillus thuringiensis var. novosibirsk; Bacillus thuringiensis var. ostriniae; Bacillus thuringiensis var. oswaldocruzi; Bacillus thuringiensis var. pahangi; Bacillus thuringiensis var. pakistani; Bacillus thuringiensis var. palmanyolensis; Bacillus thuringiensis var. pingluonsis; Bacillus thuringiensis var. pirenaica; Bacillus thuringiensis var. poloniensis; Bacillus thuringiensis var. pondicheriensis; Bacillus thuringiensis var. pulsiensis; Bacillus thuringiensis var. rongseni; Bacillus thuringiensis var. roskildiensis; Bacillus thuringiensis var. san diego; Bacillus thuringiensis var. seoulensis; Bacillus thuringiensis var. shandongiensis; Bacillus thuringiensis var. silo; Bacillus thuringiensis var. sinensis; Bacillus thuringiensis var. sooncheon; Bacillus thuringiensis var. sotto; Bacillus thuringiensis var. sotto/dendrolimus; Bacillus thuringiensis var. subtoxicus; Bacillus thuringiensis var. sumiyoshiensis; Bacillus thuringiensis var. sylvestriensis; Bacillus thuringiensis var. tenebrionis; Bacillus thuringiensis var. thailandensis; Bacillus thuringiensis var. thompsoni; Bacillus thuringiensis var. thuringiensis; Bacillus thuringiensis var. tochigiensis; Bacillus thuringiensis var. toguchini; Bacillus thuringiensis var. tohokuensis; Bacillus thuringiensis var. tolworthi; Bacillus thuringiensis var. toumanoffi; Bacillus thuringiensis var. vazensis; Bacillus thuringiensis var. wratislaviensis; Bacillus thuringiensis var. wuhanensis; Bacillus thuringiensis var. xiaguangiensis; Bacillus thuringiensis var. yosoo; Bacillus thuringiensis var. yunnanensis; Bacillus thuringiensis var. zhaodongensis; Bacillus thuringiensis str. Al Hakam; Bacillus thuringiensis T01-328; Bacillus thuringiensis YBT-1518; or Bacillus thuringiensis var. konkukian.

[0794] In some embodiments, a PFIP can be a Bacillus thuringiensis serovar. For example, in some embodiments, a PFIP can be a Bacillus thuringiensis serovar selected from the following group: Bacillus thuringiensis AKS-7; Bacillus thuringiensis Bt18247; Bacillus thuringiensis Bt18679; Bacillus thuringiensis Bt407; Bacillus thuringiensis DAR 81934; Bacillus thuringiensis DB27; Bacillus thuringiensis F14-1; Bacillus thuringiensis FC1; Bacillus thuringiensis FC10; Bacillus thuringiensis FC2; Bacillus thuringiensis FC6; Bacillus thuringiensis FC7; Bacillus thuringiensis FC8; Bacillus thuringiensis FC9; Bacillus thuringiensis HD-771; Bacillus thuringiensis HD-789; Bacillus thuringiensis HD1002; Bacillus thuringiensis IBL 200; Bacillus thuringiensis IBL 4222; Bacillus thuringiensis JM-Mgvxx-63; Bacillus thuringiensis LDC 391; Bacillus thuringiensis LM1212; Bacillus thuringiensis MC28; Bacillus thuringiensis Sbt003; Bacillus thuringiensis serovar aizawai; Bacillus thuringiensis serovar aizawai/pacificus; Bacillus thuringiensis serovar alesti; Bacillus thuringiensis serovar amagiensis; Bacillus thuringiensis serovar andalousiensis; Bacillus thuringiensis serovar argentinensis; Bacillus thuringiensis serovar asturiensis; Bacillus thuringiensis serovar azorensis; Bacillus thuringiensis serovar balearica; Bacillus thuringiensis serovar berliner; Bacillus thuringiensis serovar bolivia; Bacillus thuringiensis serovar brasilensis; Bacillus thuringiensis serovar cameroun; Bacillus thuringiensis serovar canadensis; Bacillus thuringiensis serovar chanpaisis; Bacillus thuringiensis serovar chinensis; Bacillus thuringiensis serovar colmeri; Bacillus thuringiensis serovar coreanensis; Bacillus thuringiensis serovar dakota; Bacillus thuringiensis serovar darmstadiensis; Bacillus thuringiensis serovar dendrolimus; Bacillus thuringiensis serovar entomocidus; Bacillus thuringiensis serovar entomocidus/subtoxicus; Bacillus thuringiensis serovar finitimus; Bacillus thuringiensis serovar fukuokaensis; Bacillus thuringiensis serovar galechiae; Bacillus thuringiensis serovar galleriae; Bacillus thuringiensis serovar graciosensis; Bacillus thuringiensis serovar guiyangiensis; Bacillus thuringiensis serovar higo; Bacillus thuringiensis serovar huazhongensis; Bacillus thuringiensis serovar iberica; Bacillus thuringiensis serovar indiana; Bacillus thuringiensis serovar israelensis; Bacillus thuringiensis serovar israelensis/tochigiensis; Bacillus thuringiensis serovar japonensis; Bacillus thuringiensis serovar jegathesan; Bacillus thuringiensis serovar jinghongiensis; Bacillus thuringiensis serovar kenyae; Bacillus thuringiensis serovar kim; Bacillus thuringiensis serovar kumamtoensis; Bacillus thuringiensis serovar kunthalanags3; Bacillus thuringiensis serovar kunthalaRX24; Bacillus thuringiensis serovar kunthalaRX27; Bacillus thuringiensis serovar kunthalaRX28; Bacillus thuringiensis serovar kurstaki; Bacillus thuringiensis serovar kyushuensis; Bacillus thuringiensis serovar leesis; Bacillus thuringiensis serovar londrina; Bacillus thuringiensis serovar malayensis; Bacillus thuringiensis serovar medellin; Bacillus thuringiensis serovar mexicanensis; Bacillus thuringiensis serovar mogi; Bacillus thuringiensis serovar monterrey; Bacillus thuringiensis serovar morrisoni; Bacillus thuringiensis serovar muju; Bacillus thuringiensis serovar navarrensis; Bacillus thuringiensis serovar neoleonensis; Bacillus thuringiensis serovar nigeriensis; Bacillus thuringiensis serovar novosibirsk; Bacillus thuringiensis serovar ostriniae; Bacillus thuringiensis serovar oswaldocruzi; Bacillus thuringiensis serovar pahangi; Bacillus thuringiensis serovar pakistani; Bacillus thuringiensis serovar palmanyolensis; Bacillus thuringiensis serovar pingluonsis; Bacillus thuringiensis serovar pirenaica; Bacillus thuringiensis serovar poloniensis; Bacillus thuringiensis serovar pondicheriensis; Bacillus thuringiensis serovar pulsiensis; Bacillus thuringiensis serovar rongseni; Bacillus thuringiensis serovar roskildiensis; Bacillus thuringiensis serovar san diego; Bacillus thuringiensis serovar seoulensis; Bacillus thuringiensis serovar shandongiensis; Bacillus thuringiensis serovar silo; Bacillus thuringiensis serovar sinensis; Bacillus thuringiensis serovar sooncheon; Bacillus thuringiensis serovar sotto; Bacillus thuringiensis serovar sotto/dendrolimus; Bacillus thuringiensis serovar subtoxicus; Bacillus thuringiensis serovar sumiyoshiensis; Bacillus thuringiensis serovar sylvestriensis; Bacillus thuringiensis serovar tenebrionis; Bacillus thuringiensis serovar thailandensis; Bacillus thuringiensis serovar thompsoni; Bacillus thuringiensis serovar thuringiensis; Bacillus thuringiensis serovar tochigiensis; Bacillus thuringiensis serovar toguchini; Bacillus thuringiensis serovar tohokuensis; Bacillus thuringiensis serovar tolworthi; Bacillus thuringiensis serovar toumanoffi; Bacillus thuringiensis serovar vazensis; Bacillus thuringiensis serovar wratislaviensis; Bacillus thuringiensis serovar wuhanensis; Bacillus thuringiensis serovar xiaguangiensis; Bacillus thuringiensis serovar yosoo; Bacillus thuringiensis serovar yunnanensis; Bacillus thuringiensis serovar zhaodongensis; Bacillus thuringiensis str. Al Hakam; Bacillus thuringiensis T01-328; Bacillus thuringiensis YBT-1518; and Bacillus thuringiensis serovar konkukian.

[0795] In some preferred embodiments, a PFIP can be a one of the following organisms: Bacillus thuringiensis. For example, in some embodiments, the PFIP can be isolated from Bacillus thuringiensis var. israelensis, Bacillus thuringiensis var. aizawai, Bacillus thuringiensis var. kurstaki, or Bacillus thuringiensis var. tenebrionensis.

[0796] In some embodiments, a PFIP can be a PFIP, wherein said PFIP is a protein isolated from Bacillus thuringiensis. For example, in some embodiments, the PFIP can be isolated from Bacillus thuringiensis var. israelensis, Bacillus thuringiensis var. aizawai, Bacillus thuringiensis var. kurstaki, or Bacillus thuringiensis var. tenebrionensis.

[0797] In some embodiments, the PFIP isolated from a Bacillus thuringiensis can be contained in a commercially available product. For example, in some embodiments, the commercially available product comprising a PFIP can be AQUABAC XT® from Becker Microbial Products, Inc.; NOVODOR® FC from VALENT® U.S.A. LLC Agricultural Products; and/or BioProtec Plus™ from AEF Global Inc.

[0798] In some embodiments, a PFIP can be one or more toxins produced by Bacillus thuringiensis ssp. kurstaki strain EVB-113-19 cells.

[0799] In some embodiments, a PFIP can be one or more fermentation solids, spores, and/or insecticidal toxins isolated from Bacillus thuringiensis ssp. kurstaki strain EVB-113-19 cells.

[0800] In some embodiments, a PFIP can be one or more fermentation solids, spores, and/or insecticidal toxins isolated from Bacillus thuringiensis ssp. tenebrionis strain NB-176 cells.

[0801] In some embodiments, a PFIP can be one or more fermentation solids, spores, and/or insecticidal toxins isolated from Bacillus thuringiensis ssp. israelensis Strain BMP 144 cells.

[0802] In some embodiments, a PFIP can be AQUABAC XT®, consisting of the following ingredients: 6-10% (˜8%) Bacillus thuringiensis ssp. israelensis Strain BMP 144 solids, spores & insecticidal toxins, wherein said insecticidal toxins are δ-endotoxins, and equivalent to 1,200 International Toxic Units (ITU/mg) (4.84 Billion ITU/gallon or 1.2 Billion ITU/Liter); and ˜92% other/inactive ingredients.

[0803] In some embodiments, a PFIP can be NOVODOR® FC (or flowable concentrate), consisting of 10% Bacillus thuringiensis ssp. tenebrionis strain NB-176 fermentation solids and solubles, with a potency of 15,000 Leptinotarsa Units (LTU) per gram of product (equivalent to 16.3 Million LTU's per quart of product); and 90% other/inactive ingredients.

[0804] In some embodiments, a PFIP can be BioProtec Plus™, consisting of 14.49% Bacillus thuringiensis ssp. kurstaki strain EVB-113-19 fermentation solids, spores, and insecticidal toxins with a potency of 17,500 Cabbage Looper Units (CLU) per mg of product (equivalent to 76 billion CLU per gallon of product); and 85.51% other/inactive ingredients.

[0805] In some embodiments, a PFIP can be a 6-endotoxin (e.g., a Crystal (Cry) toxin and/or a cytolytic (Cyt) toxin); a vegetative insecticidal protein (Vip); a secreted insecticidal protein (Sip); or a Bin-like toxin.

[0806] In some embodiments, a PFIP has an amino acid sequence as set forth in SEQ ID NOs: 33-46, 49-533, or 1366-1552.

[0807] In some embodiments, a PFIP can be one or more of the following Cry proteins: Cry1Aa1, Cry1Aa2, Cry1Aa3, Cry1Aa4, Cry1Aa5, Cry1Aa6, Cry1Aa7, Cry1Aa8, Cry1Aa9, Cry1Aa10, Cry1Aa11, Cry1Aa12, Cry1Aa13, Cry1Aa14, Cry1Aa15, Cry1Aa16, Cry1Aa17, Cry1Aa18, Cry1Aa19, Cry1Aa20, Cry1Aa21, Cry1Aa22, Cry1Aa23, Cry1Aa24, Cry1Aa25, Cry1Ab1, Cry1Ab2, Cry1Ab3, Cry1Ab4, Cry1Ab5, Cry1Ab6, Cry1Ab7, Cry1Ab8, Cry1Ab9, Cry1Ab10, Cry1Ab11, Cry1Ab12, Cry1Ab13, Cry1Ab14, Cry1Ab15, Cry1Ab16, Cry1Ab17, Cry1Ab18, Cry1Ab19, Cry1Ab20, Cry1Ab21, Cry1Ab22, Cry1Ab23, Cry1Ab24, Cry1Ab25, Cry1Ab26, Cry1Ab27, Cry1Ab28, Cry1Ab29, Cry1Ab30, Cry1Ab31, Cry1Ab32, Cry1Ab33, Cry1Ab34, Cry1Ab35, Cry1Ab36, Cry1Ab-like, Cry1Ab-like, Cry1Ab-like, Cry1Ab-like, Cry1Ac1, Cry1Ac2, Cry1Ac3, Cry1Ac4, Cry1Ac5, Cry1Ac6, Cry1Ac7, Cry1Ac8, Cry1Ac9, Cry1Ac10, Cry1Ac11, Cry1Ac12, Cry1Ac13, Cry1Ac14, Cry1Ac15, Cry1Ac16, Cry1Ac17, Cry1Ac18, Cry1Ac19, Cry1Ac20, Cry1Ac21, Cry1Ac22, Cry1Ac23, Cry1Ac24, Cry1Ac25, Cry1Ac26, Cry1Ac27, Cry1Ac28, Cry1Ac29, Cry1Ac30, Cry1Ac31, Cry1Ac32, Cry1Ac33, Cry1Ac34, Cry1Ac35, Cry1Ac36, Cry1Ac37, Cry1Ac38, Cry1Ac39, Cry1Ad1, Cry1Ad2, Cry1Ae1, Cry1Af1, Cry1Ag1, Cry1Ah1, Cry1Ah2, Cry1Ah3, Cry1Ai1, Cry1Ai2, Cry1Aj1, Cry1A-like, Cry1Ba1, Cry1Ba2, Cry1Ba3, Cry1Ba4, Cry1Ba5, Cry1Ba6, Cry1Ba7, Cry1Ba8, Cry1Bb1, Cry1Bb2, Cry1Bb3, Cry1Bc1, Cry1Bd1, Cry1Bd2, Cry1Bd3, Cry1Be1, Cry1Be2, Cry1Be3, Cry1Be4, Cry1Be5, Cry1Bf1, Cry1Bf2, Cry1Bg1, Cry1Bh1, Cry1Bi1, Cry1Bj1, Cry1Ca1, Cry1Ca2, Cry1Ca3, Cry1Ca4, Cry1Ca5, Cry1Ca6, Cry1Ca7, Cry1Ca8, Cry1Ca9, Cry1Ca10, Cry1Ca11, Cry1Ca12, Cry1Ca13, Cry1Ca14, Cry1Ca15, Cry1Cb1, Cry1Cb2, Cry1Cb3, Cry1Cb-like, Cry1Da1, Cry1Da2, Cry1Da3, Cry1Da4, Cry1Da5, Cry1Db1, Cry1Db2, Cry1Dc1, Cry1Dd1, Cry1Ea1, Cry1Ea2, Cry1Ea3, Cry1Ea4, Cry1Ea5, Cry1Ea6, Cry1Ea7, Cry1Ea8, Cry1Ea9, Cry1Ea10, Cry1Ea11, Cry1Ea12, Cry1Eb1, Cry1Fa1, Cry1Fa2, Cry1Fa3, Cry1Fa4, Cry1Fb1, Cry1Fb2, Cry1Fb3, Cry1Fb4, Cry1Fb5, Cry1Fb6, Cry1Fb7, Cry1Ga1, Cry1Ga2, Cry1Gb1, Cry1Gb2, Cry1Gc1, Cry1Ha1, Cry1Hb1, Cry1Hb2, Cry1Hc1, Cry1H-like, Cry1Ia1, Cry1Ia2, Cry1Ia3, Cry1Ia4, Cry1Ia5, Cry1Ia6, Cry1Ia7, Cry1Ia8, Cry1Ia9, Cry1Ia10, Cry1Ia11, Cry1Ia12, Cry1Ia13, Cry1Ia14, Cry1Ia15, Cry1Ia16, Cry1Ia17, Cry1Ia18, Cry1Ia19, Cry1Ia20, Cry1Ia21, Cry1Ia22, Cry1Ia23, Cry1Ia24, Cry1Ia25, Cry1Ia26, Cry1Ia27, Cry1Ia28, Cry1Ia29, Cry1Ia30, Cry1Ia31, Cry1Ia32, Cry1Ia33, Cry1Ia34, Cry1Ia35, Cry1Ia36, Cry1Ia37, Cry1Ia38, Cry1Ia39, Cry1Ia40, Cry1Ib1, Cry1Ib2, Cry1Ib3, Cry1Ib4, Cry1Ib5, Cry1Ib6, Cry1Ib7, Cry1Ib8, Cry1Ib9, Cry1Ib10, Cry1Ib11, Cry1Ic1, Cry1Ic2, Cry1Id1, Cry1Id2, Cry1Id3, Cry1Ie1, Cry1Ie2, Cry1Ie3, Cry1Ie4, Cry1Ie5, Cry1If1, Cry1Ig1, Cry1I-like, Cry1I-like, Cry1Ja1, Cry1Ja2, Cry1Ja3, Cry1Jb1, Cry1Jc1, Cry1Jc2, Cry1Jd1, Cry1Ka1, Cry1Ka2, Cry1La1, Cry1La2, Cry1La3, Cry1Ma1, Cry1Ma2, Cry1Na1, Cry1Na2, Cry1Na3, Cry1Nb1, Cry1-like, Cry2Aa1, Cry2Aa2, Cry2Aa3, Cry2Aa4, Cry2Aa5, Cry2Aa6, Cry2Aa7, Cry2Aa8, Cry2Aa9, Cry2Aa10, Cry2Aa11, Cry2Aa12, Cry2Aa13, Cry2Aa14, Cry2Aa15, Cry2Aa16, Cry2Aa17, Cry2Aa18, Cry2Aa19, Cry2Aa20, Cry2Aa21, Cry2Aa22, Cry2Aa23, Cry2Aa23, Cry2Aa25, Cry2Ab1, Cry2Ab2, Cry2Ab3, Cry2Ab4, Cry2Ab5, Cry2Ab6, Cry2Ab7, Cry2Ab8, Cry2Ab9, Cry2Ab10, Cry2Ab11, Cry2Ab12, Cry2Ab13, Cry2Ab14, Cry2Ab15, Cry2Ab16, Cry2Ab17, Cry2Ab18, Cry2Ab19, Cry2Ab20, Cry2Ab21, Cry2Ab22, Cry2Ab23, Cry2Ab24, Cry2Ab25, Cry2Ab26, Cry2Ab27, Cry2Ab28, Cry2Ab29, Cry2Ab30, Cry2Ab31, Cry2Ab32, Cry2Ab33, Cry2Ab34, Cry2Ab35, Cry2Ab36, Cry2Ac1, Cry2Ac2, Cry2Ac3, Cry2Ac4, Cry2Ac5, Cry2Ac6, Cry2Ac7, Cry2Ac8, Cry2Ac9, Cry2Ac10, Cry2Ac11, Cry2Ac12, Cry2Ad1, Cry2Ad2, Cry2Ad3, Cry2Ad4, Cry2Ad5, Cry2Ae1, Cry2Af1, Cry2Af2, Cry2Ag1, Cry2Ah1, Cry2Ah2, Cry2Ah3, Cry2Ah4, Cry2Ah5, Cry2Ah6, Cry2Ai1, Cry2Aj1, Cry2Ak1, Cry2Al1, Cry2Ba1, Cry2Ba2, Cry3Aa1, Cry3Aa2, Cry3Aa3, Cry3Aa4, Cry3Aa5, Cry3Aa6, Cry3Aa7, Cry3Aa8, Cry3Aa9, Cry3Aa10, Cry3Aa11, Cry3Aa12, Cry3Ba1, Cry3Ba2, Cry3Ba3, Cry3Bb1, Cry3Bb2, Cry3Bb3, Cry3Ca1, Cry4Aa1, Cry4Aa2, Cry4Aa3, Cry4Aa4, Cry4A-like, Cry4Ba1, Cry4Ba2, Cry4Ba3, Cry4Ba4, Cry4Ba5, Cry4Ba-like, Cry4Ca1, Cry4Ca2, Cry4Cb1, Cry4Cb2, Cry4Cb3, Cry4Cc1, Cry5Aa1, Cry5Ab1, Cry5Ac1, Cry5Ad1, Cry5Ba1, Cry5Ba2, Cry5Ba3, Cry5Ca1, Cry5Ca2, Cry5Da1, Cry5Da2, Cry5Ea1, Cry5Ea2, Cry6Aa1, Cry6Aa2, Cry6Aa3, Cry6Ba1, Cry7Aa1, Cry7Aa2, Cry7Ab1, Cry7Ab2, Cry7Ab3, Cry7Ab4, Cry7Ab5, Cry7Ab6, Cry7Ab7, Cry7Ab8, Cry7Ab9, Cry7Ac1, Cry7Ba1, Cry7Bb1, Cry7Ca1, Cry7Cb1, Cry7Da1, Cry7Da2, Cry7Da3, Cry7Ea1, Cry7Ea2, Cry7Ea3, Cry7Fa1, Cry7Fa2, Cry7Fb1, Cry7Fb2, Cry7Fb3, Cry7Ga1, Cry7Ga2, Cry7Gb1, Cry7Gc1, Cry7Gd1, Cry7Ha1, Cry7Ia1, Cry7Ja1, Cry7Ka1, Cry7Kb1, Cry7La1, Cry8Aa1, Cry8Ab1, Cry8Ac1, Cry8Ad1, Cry8Ba1, Cry8Bb1, Cry8Bc1, Cry8Ca1, Cry8Ca2, Cry8Ca3, Cry8Ca4, Cry8Ca5, Cry8Da1, Cry8Da2, Cry8Da3, Cry8Db1, Cry8Ea1, Cry8Ea2, Cry8Ea3, Cry8Ea4, Cry8Ea5, Cry8Ea6, Cry8Fa1, Cry8Fa2, Cry8Fa3, Cry8Fa4, Cry8Ga1, Cry8Ga2, Cry8Ga3, Cry8Ha1, Cry8Hb1, Cry8Ia1, Cry8Ia2, Cry8Ia3, Cry8Ia4, Cry8Ib1, Cry8Ib2, Cry8Ib3, Cry8Ja1, Cry8Ka1, Cry8Ka2, Cry8Ka3, Cry8Kb1, Cry8Kb2, Cry8Kb3, Cry8La1, Cry8Ma1, Cry8Ma2, Cry8Ma3, Cry8Na1, Cry8Pa1, Cry8Pa2, Cry8Pa3, Cry8Qa1, Cry8Qa2, Cry8Ra1, Cry8Sa1, Cry8Ta1, Cry8-like, Cry8-like, Cry9Aa1, Cry9Aa2, Cry9Aa3, Cry9Aa4, Cry9Aa5, Cry9Aa, like, Cry9Ba1, Cry9Ba2, Cry9Bb1, Cry9Ca1, Cry9Ca2, Cry9Cb1, Cry9Da1, Cry9Da2, Cry9Da3, Cry9Da4, Cry9Db1, Cry9Dc1, Cry9Ea1, Cry9Ea2, Cry9Ea3, Cry9Ea4, Cry9Ea5, Cry9Ea6, Cry9Ea7, Cry9Ea8, Cry9Ea9, Cry9Ea10, Cry9Ea11, Cry9Eb1, Cry9Eb2, Cry9Eb3, Cry9Ec1, Cry9Ed1, Cry9Ee1, Cry9Ee2, Cry9Fa1, Cry9Ga1, Cry9-like, Cry10Aa1, Cry10Aa2, Cry10Aa3, Cry10Aa4, Cry10A-like, Cry11Aa1, Cry11Aa2, Cry11Aa3, Cry11Aa4, Cry11Aa5, Cry11Aa-like, Cry11Ba1, Cry11Bb1, Cry11Bb2, Cry12Aa1, Cry13Aa1, Cry13Aa2, Cry14Aa1, Cry14Ab1, Cry15Aa1, Cry16Aa1, Cry17Aa1, Cry18Aa1, Cry18Ba1, Cry18Ca1, Cry19Aa1, Cry19Ba1, Cry19Ca1, Cry20Aa1, Cry20Ba1, Cry20Ba2, Cry20-like, Cry21Aa1, Cry21Aa2, Cry21Aa3, Cry21Ba1, Cry21Ca1, Cry21Ca2, Cry21Da1, Cry21Ea1, Cry21Fa1, Cry21Ga1, Cry21Ha1, Cry22Aa1, Cry22Aa2, Cry22Aa3, Cry22Ab1, Cry22Ab2, Cry22Ba1, Cry22Bb1, Cry23Aa1, Cry24Aa1, Cry24Ba1, Cry24Ca1, Cry24Da1, Cry25Aa1, Cry26Aa1, Cry27Aa1, Cry28Aa1, Cry28Aa2, Cry29Aa1, Cry29Ba1, Cry30Aa1, Cry30Ba1, Cry30Ca1, Cry30Ca2, Cry30Da1, Cry30Db1, Cry30Ea1, Cry30Ea2, Cry30Ea3, Cry30Ea4, Cry30Fa1, Cry30Ga1, Cry30Ga2, Cry31Aa1, Cry31Aa2, Cry31Aa3, Cry31Aa4, Cry31Aa5, Cry31Aa6, Cry31Ab1, Cry31Ab2, Cry31Ac1, Cry31Ac2, Cry31Ad1, Cry31Ad2, Cry32Aa1, Cry32Aa2, Cry32Ab1, Cry32Ba1, Cry32Ca1, Cry32Cb1, Cry32Da1, Cry32Ea1, Cry32Ea2, Cry32Eb1, Cry32Fa1, Cry32Ga1, Cry32Ha1, Cry32Hb1, Cry32Ia1, Cry32Ja1, Cry32Ka1, Cry32La1, Cry32Ma1, Cry32Mb1, Cry32Na1, Cry32a1, Cry32Pa1, Cry32Qa1, Cry32Ra1, Cry32Sa1, Cry32Ta1, Cry32Ua1, Cry32Va1, Cry32Wa1, Cry32Wa2, Cry32Xa1, Cry32Ya1, Cry33Aa1, Cry34Aa1, Cry34Aa2, Cry34Aa3, Cry34Aa4, Cry34Ab1, Cry34Ac1, Cry34Ac2, Cry34Ac3, Cry34Ba1, Cry34Ba2, Cry34Ba3, Cry35Aa1, Cry35Aa2, Cry35Aa3, Cry35Aa4, Cry35Ab1, Cry35Ab2, Cry35Ab3, Cry35Ac1, Cry35Ba1, Cry35Ba2, Cry35Ba3, Cry36Aa1, Cry37Aa1, Cry38Aa1, Cry39Aa1, Cry40Aa1, Cry40Ba1, Cry40Ca1, Cry40Da1, Cry41Aa1, Cry41Ab1, Cry41Ba1, Cry41Ba2, Cry41Ca1, Cry42Aa1, Cry43Aa1, Cry43Aa2, Cry43Ba1, Cry43Ca1, Cry43Cb1, Cry43Cc1, Cry43-like, Cry44Aa1, Cry45Aa1, Cry45Ba1, Cry46Aa1, Cry46Aa2, Cry46Ab1, Cry47Aa1, Cry48Aa1, Cry48Aa2, Cry48Aa3, Cry48Ab1, Cry48Ab2, Cry49Aa1, Cry49Aa2, Cry49Aa3, Cry49Aa4, Cry49Ab1, Cry50Aa1, Cry50Ba1, Cry50Ba2, Cry51Aa1, Cry51Aa2, Cry52Aa1, Cry52Ba1, Cry52Ca1, Cry53Aa1, Cry53Ab1, Cry54Aa1, Cry54Aa2, Cry54Ab1, Cry54Ba1, Cry54Ba2, Cry55Aa1, Cry55Aa2, Cry55Aa3, Cry56Aa1, Cry56Aa2, Cry56Aa3, Cry56Aa4, Cry57Aa1, Cry57Ab1, Cry58Aa1, Cry59Ba1, Cry59Aa1, Cry60Aa1, Cry60Aa2, Cry60Aa3, Cry60Ba1, Cry60Ba2, Cry60Ba3, Cry61Aa1, Cry61Aa2, Cry61Aa3, Cry62Aa1, Cry63Aa1, Cry64Aa1, Cry64Ba1, Cry64Ca1, Cry65Aa1, Cry65Aa2, Cry66Aa1, Cry66Aa2, Cry67Aa1, Cry67Aa2, Cry68Aa1, Cry69Aa1, Cry69Aa2, Cry69Ab1, Cry70Aa1, Cry70Ba1, Cry70Bb1, Cry71Aa1, Cry72Aa1, Cry72Aa2, Cry73Aa1, Cry74Aa, Cry75Aa1, Cry75Aa2, Cry75Aa3, Cry76Aa1, Cry77Aa1, and/or Cry78Aa1.

[0808] In some embodiments, a mixture comprising one or more PFIPs and one or more CRIPs, can have one or more of the PFIPs be a Cry toxin as described herein, or presented in Table 7.

TABLE 7
Non-limiting examples of Cry toxins, their accession numbers
on NCBI, and strain. Here, if a cell is left blank, then
the accession number and/or strain is not applicable.

| Name | NCBI Accession No. | Strain/Other ID |
|---|---|---|
| Cry1Aa1 | AAA22353 | Bt kurstaki HD1 |
| Cry1Aa2 | AAA22552 | Bt sotto |
| Cry1Aa3 | BAA00257 | Bt aizawai IPL7 |
| Cry1Aa4 | CAA31886 | Bt entomocidus |
| Cry1Aa5 | BAA04468 | Bt Fu-2-7 |
| Cry1Aa6 | AAA86265 | Bt kurstaki NRD-12 |
| Cry1Aa7 | AAD46139 | Bt C12 |
| Cry1Aa8 | I26149 | |
| Cry1Aa9 | BAA77213 | Bt dendrolimus T84A1 |
| Cry1Aa10 | AAD55382 | Bt kurstaki HD-1-02 |
| Cry1Aa11 | CAA70856 | Bt kurstaki |
| Cry1Aa12 | AAP80146 | Bt Ly30 |
| Cry1Aa13 | AAM44305 | Bt sotto |
| Cry1Aa14 | AAP40639 | unpublished |
| Cry1Aa15 | AAY66993 | Bt INTA Mol-12 |
| Cry1Aa16 | HQ439776 | Bt Ps9-E2 |
| Cry1Aa17 | HQ439788 | Bt PS9-C12 |
| Cry1Aa18 | HQ439790 | Bt PS9-D12 |
| Cry1Aa19 | HQ685121 | Bt LS-R-21 |
| Cry1Aa20 | JF340156 | Bt SK-798 |
| Cry1Aa21 | JN651496 | Bt LTS-209 |
| Cry1Aa22 | KC158223 | Bt Lip |
| Cry1Aa23 | KJ125392 | Bt |
| Cry1Aa24 | AGH68331 | Btk NAIMCC-B-00167 |
| Cry1Aa25 | MK391629 | Bt MPUB5 |
| Cry1Ab1 | AAA22330 | Bt berliner 1715 |
| Cry1Ab2 | AAA22613 | Bt kurstaki |
| Cry1Ab3 | AAA22561 | Bt kurstaki HD1 |
| Cry1Ab4 | BAA00071 | Bt kurstaki HD1 |
| Cry1Ab5 | CAA28405 | Bt berliner 1715 |
| Cry1Ab6 | AAA22420 | Bt kurstaki NRD-12 |
| Cry1Ab7 | CAA31620 | Bt aizawai IC1 |
| Cry1Ab8 | AAA22551 | Bt aizawai IPL7 |
| Cry1Ab9 | CAA38701 | Bt aizawai HD133 |
| Cry1Ab10 | A29125 | Bt kurstaki HD1 |
| Cry1Ab11 | I12419 | Bt A20 |
| Cry1Ab12 | AAC64003 | Bt kurstaki S93 |
| Cry1Ab13 | AAN76494 | Bt c005 |
| Cry1Ab14 | AAG16877 | Native Chilean Bt |
| Cry1Ab15 | AAO13302 | Bt B-Hm-16 |
| Cry1Ab16 | AAK55546 | Bt AC-11 |
| Cry1Ab17 | AAT46415 | Bt WB9 |
| Cry1Ab18 | AAQ88259 | Bt |
| Cry1Ab19 | AAW31761 | Bt X-2 |
| Cry1Ab20 | ABB72460 | BtC008 |
| Cry1Ab21 | ABS18384 | Bt IS5056 |
| Cry1Ab22 | ABW87320 | BtS2491Ab |
| Cry1Ab23 | HQ439777 | Bt N32-2-2 |
| Cry1Ab24 | HQ439778 | Bt HD12 |
| Cry1Ab25 | HQ685122 | Bt LS-R-30 |
| Cry1Ab26 | HQ847729 | DOR BT-1 |
| Cry1Ab27 | JN135249 | |
| Cry1Ab28 | JN135250 | |
| Cry1Ab29 | JN135251 | |
| Cry1Ab30 | JN135252 | |
| Cry1Ab31 | JN135253 | |
| Cry1Ab32 | JN135254 | |
| Cry1Ab33 | AAS93798 | Bt kenyae K3 |
| Cry1Ab34 | KC156668 | ARP102 |
| Cry1Ab35 | KT692985 | Bt GS36 |
| Cry1Ab36 | KY440260 | Bt NEAUB-X5 |
| Cry1Ab-like | AAK14336 | Bt kunthala RX24 |
| Cry1Ab-like | AAK14337 | Bt kunthala RX28 |
| Cry1Ab-like | AAK14338 | Bt kunthala RX27 |
| Cry1Ab-like | ABG88858 | Bt ly4a3 |
| Cry1Ac1 | AAA22331 | Bt kurstaki HD73 |
| Cry1Ac2 | AAA22338 | Bt kenyae |
| Cry1Ac3 | CAA38098 | Bt BTS89A |
| Cry1Ac4 | AAA73077 | Bt kurstaki PS85A1 |
| Cry1Ac5 | AAA22339 | Bt kurstaki PS81GG |
| Cry1Ac6 | AAA86266 | Bt kurstaki NRD-12 |
| Cry1Ac7 | AAB46989 | Bt kurstaki HD73 |
| Cry1Ac8 | AAC44841 | Bt kurstaki HD73 |
| Cry1Ac9 | AAB49768 | Bt DSIR732 |
| Cry1Ac10 | CAA05505 | Bt kurstaki YBT-1520 |
| Cry1Ac11 | CAA10270 | |
| Cry1Ac12 | I12418 | Bt A20 |
| Cry1Ac13 | AAD38701 | Bt kurstaki HD1 |
| Cry1Ac14 | AAQ06607 | Bt Ly30 |
| Cry1Ac15 | AAN07788 | Bt from Taiwan |
| Cry1Ac16 | AAU87037 | Bt H3 |
| Cry1Ac17 | AAX18704 | Bt kenyae HD549 |
| Cry1Ac18 | AAY88347 | Bt SK-729 |
| Cry1Ac19 | ABD37053 | Bt C-33 |
| Cry1Ac20 | ABB89046 | |
| Cry1Ac21 | AAY66992 | INTA Mol-12 |
| Cry1Ac22 | ABZ01836 | Bt W015-1 |
| Cry1Ac23 | CAQ30431 | Bt |
| Cry1Ac24 | ABL01535 | Bt 146-158-01 |
| Cry1Ac25 | FJ513324 | Bt Tm37-6 |
| Cry1Ac26 | FJ617446 | Bt Tm41-4 |
| Cry1Ac27 | FJ617447 | Bt Tm44-lB |
| Cry1Ac28 | ACM90319 | Bt Q-12 |
| Cry1Ac29 | DQ438941 | INTA TA24-6 |
| Cry1Ac30 | GQ227507 | Bt S1478-1 |
| Cry1Ac31 | GU446674 | Bt S3299-1 |
| Cry1Ac32 | HM061081 | Bt ZQ-89 |
| Cry1Ac33 | GQ866913 | Bt SK-711 |
| Cry1Ac34 | HQ230364 | Bt SK-783 |
| Cry1Ac35 | JF340157 | Bt SK-784 |
| Cry1Ac36 | JN387137 | Bt SK-958 |
| Cry1Ac37 | JQ317685 | Bt SK-793 |
| Cry1Ac38 | ACC86135 | Bt LSZ9408 |
| Cry1Ac39 | ALT07695 | LBIT1200 |
| Cry1Ad1 | AAA22340 | Bt aizawai PS81I |
| Cry1Ad2 | CAA01880 | Bt PS81RR1 |
| Cry1Ae1 | AAA22410 | Bt alesti |
| Cry1Af1 | AAB82749 | Bt NT0423 |
| Cry1Ag1 | AAD46137 | |
| Cry1Ah1 | AAQ14326 | |
| Cry1Ah2 | ABB76664 | Bt alesti |
| Cry1Ah3 | HQ439779 | Bt S6 |
| Cry1Ai1 | AAO39719 | |
| Cry1Ai2 | HQ439780 | Bt SC6H8 |
| Cry1Aj1 | KJ28846 | |
| Cry1A-like | AAK14339 | Bt kunthala nags3 |
| Cry1Ba1 | CAA29898 | Bt thuringiensis HD2 |
| Cry1Ba2 | CAA65003 | Bt entomocidus HD110 |
| Cry1Ba3 | AAK63251 | |
| Cry1Ba4 | AAK51084 | Bt entomocidus HD9 |
| Cry1Ba5 | ABO20894 | Bt sfw-12 |
| Cry1Ba6 | ABL60921 | Bt S601 |
| Cry1Ba7 | HQ439781 | Bt N17-37 |
| Cry1Ba8 | KJ868173 | Bt Na205-3 |
| Cry1Bb1 | AAA22344 | Bt EG5847 |
| Cry1Bb2 | HQ439782 | Bt WBT-2 |
| Cry1Bb3 | KJ619659 | Bt FH21 |
| Cry1Bc1 | CAA86568 | Bt morrisoni |
| Cry1Bd1 | AAD10292 | Bt wuhanensis HD525 |
| Cry1Bd2 | AAM93496 | Bt 834 |
| Cry1Bd3 | KX398132 | Bt K4 |
| Cry1Be1 | AAC32850 | Bt PS158C2 |
| Cry1Be2 | AAQ52387 | |
| Cry1Be3 | ACV96720 | Bt g9 |
| Cry1Be4 | HM070026 | |
| Cry1Be5 | KU761578 | Bt LBR2 |
| Cry1Bf1 | CAC50778 | |
| Cry1Bf2 | AAQ52380 | |
| Cry1Bg1 | AAO39720 | |
| Cry1Bh1 | HQ589331 | Bt PS46L |
| Cry1Bi1 | KC156700 | ARP260 |
| Cry1Bj1 | KT952325 | Bt |
| Cry1Ca1 | CAA30396 | Bt entomocidus 60.5 |
| Cry1Ca2 | CAA31951 | Bt aizawai 7.29 |
| Cry1Ca3 | AAA22343 | Bt aizawai PS81I |
| Cry1Ca4 | CAA01886 | Bt entomocidus HD110 |
| Cry1Ca5 | CAA65457 | Bt aizawai 7.29 |
| Cry1Ca6 [1] | AAF37224 | Bt AF-2 |
| Cry1Ca7 | AAG50438 | Bt J8 |
| Cry1Ca8 | AAM00264 | Bt c002 |
| Cry1Ca9 | AAL79362 | Bt G10-01A |
| Cry1Ca10 | AAN16462 | Bt E05-20a |
| Cry1Ca11 | AAX53094 | Bt C-33 |
| Cry1Ca12 | HM070027 | mo3-E7 |
| Cry1Ca13 | HQ412621 | Bt LB-R-78 |
| Cry1Ca14 | JN651493 | Bt LTS-38 |
| Cry1Ca15 | MK391630 | Bt MPU B5 |
| Cry1Cb1 | M97880 | Bt galleriae HD29 |
| Cry1Cb2 | AAG35409 | Bt c001 |
| Cry1Cb3 | ACD50894 | Bt 087 |
| Cry1Cb-like | AAX63901 | Bt TA476-1 |
| Cry1Da1 | CAA38099 | Bt aizawai HD68 |
| Cry1Da2 | I76415 | |
| Cry1Da3 | HQ439784 | Bt HD12 |
| Cry1Da4 | KJ619660 | Bt FH21 |
| Cry1Da5 | MG181949 | QL75-2 |
| Cry1Db1 | CAA80234 | Bt BTS00349A |
| Cry1Db2 | AAK48937 | Bt B-Pr-88 |
| Cry1Dc1 | ABK35074 | Bt JC291 |
| Cry1Dd1 | KJ28844 | |
| Cry1Ea1 | CAA37933 | Bt kenyae 4F1 |
| Cry1Ea2 | CAA39609 | Bt kenyae |
| Cry1Ea3 | AAA22345 | Bt kenyae PS81F |
| Cry1Ea4 | AAD04732 | Bt kenyae LBIT-147 |
| Cry1Ea5 | A15535 | |
| Cry1Ea6 | AAL50330 | Bt YBT-032 |
| Cry1Ea7 | AAW72936 | Bt JC190 |
| Cry1Ea8 | ABX11258 | Bt HZM2 |
| Cry1Ea9 | HQ439785 | Bt S6 |
| Cry1Ea10 | ADR00398 | Bt BR64 |
| Cry1Ea11 | JQ652456 | Bt |
| Cry1Ea12 | KF601559 | Bt strain V4 |
| Cry1Eb1 | AAA22346 | Bt aizawai PS81A2 |
| Cry1Fa1 | AAA22348 | Bt aizawai EG6346 |
| Cry1Fa2 | AAA22347 | Bt aizawai PS81I |
| Cry1Fa3 | HM070028 | Bt mo3-D8 |
| Cry1Fa4 | HM439638 | Bt mo3-D10 |
| Cry1Fb1 | CAA80235 | Bt BTS00349A |
| Cry1Fb2 | BAA25298 | Bt morrisoni INA67 |
| Cry1Fb3 | AAF21767 | Bt morrisoni |
| Cry1Fb4 | AAC10641 | |
| Cry1Fb5 | AAO13295 | Bt B-Pr-88 |
| Cry1Fb6 | ACD50892 | Bt 012 |
| Cry1Fb7 | ACD50893 | Bt 087 |
| Cry1Ga1 | CAA80233 | Bt BTS0349A |
| Cry1Ga2 | CAA70506 | Bt wuhanensis |
| Cry1Gb1 | AAD10291 | Bt wuhanensis HD525 |
| Cry1Gb2 | AAO13756 | Bt B-Pr-88 |
| Cry1Gc1 | AAQ52381 | |
| Cry1Ha1 | CAA80236 | Bt BTS02069AA |
| Cry1Hb1 | AAA79694 | Bt morrisoni BF190 |
| Cry1Hb2 | HQ439786 | Bt WBT-2 |
| Cry1Hc1 | KJ28845 | |
| Cry1H-like | AAF01213 | Bt JC291 |
| Cry1Ia1 | CAA44633 | Bt kurstaki |
| Cry1Ia2 | AAA22354 | Bt kurstaki |
| Cry1Ia3 | AAC36999 | Bt kurstaki HD1 |
| Cry1Ia4 | AAB00958 | Bt AB88 |
| Cry1Ia5 | CAA70124 | Bt 61 |
| Cry1Ia6 | AAC26910 | Bt kurstaki S101 |
| Cry1Ia7 | AAM73516 | Bt |
| Cry1Ia8 | AAK66742 | |
| Cry1Ia9 | AAQ08616 | Bt Ly30 |
| Cry1Ia10 | AAP86782 | Bt thuringiensis |
| Cry1Ia11 | CAC85964 | Bt kurstaki BNS3 |
| Cry1Ia12 | AAV53390 | Bt |
| Cry1Ia13 | ABF83202 | Bt |
| Cry1Ia14 | ACG63871 | Bt11 |
| Cry1Ia15 | FJ617445 | Bt E-1B |
| Cry1Ia16 | FJ617448 | Bt E-1A |
| Cry1Ia17 | GU989199 | Bt MX2 |
| Cry1Ia18 | ADK23801 | Bt MX9 |
| Cry1Ia19 | HQ439787 | Bt SC6H6 |
| Cry1Ia20 | JQ228426 | Bt wu1H-3 |
| Cry1Ia21 | JQ228424 | Bt you1D-9 |
| Cry1Ia22 | JQ228427 | Bt wu1E-3 |
| Cry1Ia23 | JQ228428 | Bt wu1E-4 |
| Cry1Ia24 | JQ228429 | Bt wu2B-6 |
| Cry1Ia25 | JQ228430 | Bt wu2G-11 |
| Cry1Ia26 | JQ228431 | Bt wu2G-12 |
| Cry1Ia27 | JQ228432 | Bt you2D-3 |
| Cry1Ia28 | JQ228433 | Bt you2E-3 |
| Cry1Ia29 | JQ228434 | Bt you2F-3 |
| Cry1Ia30 | JQ317686 | Bt 4J4 |
| Cry1Ia31 | JX944038 | Bt SC-7 |
| Cry1Ia32 | JX944039 | Bt SC-13 |
| Cry1Ia33 | JX944040 | Bt SC-51 |
| Cry1Ia34 | KJ868171 | Bt Na205-3 |
| Cry1Ia35 | AIF79803 | Bt V4 |
| Cry1Ia36 | KY212747 | Bt YC-10 |
| Cry1Ia37 | MG674828 | Bt SY80 |
| Cry1Ia38 | MG584186 | |
| Cry1Ia39 | MK393238 | Bt INTA H4-3 |
| Cry1Ia40 | MK391631 | Bt MPU B9 |
| Cry1Ib1 | AAA82114 | Bt entomocidus BP465 |
| Cry1Ib2 | ABW88019 | Bt PP61 |
| Cry1Ib3 | ACD75515 | Bt GS8 |
| Cry1Ib4 | HM051227 | Bt BF-4 |
| Cry1Ib5 | HM070028 | Bt mo3-D8 |
| Cry1Ib6 | ADK38579 | Bt LB52 |
| Cry1Ib7 | JN571740 | Bt SK-935 |
| Cry1Ib8 | JN675714 | |
| Cry1Ib9 | JN675715 | |
| Cry1Ib10 | JN675716 | |
| Cry1Ib11 | JQ228423 | Bt HD12 |
| Cry1Ic1 | AAC62933 | Bt C18 |
| Cry1Ic2 | AAE71691 | |
| Cry1Id1 | AAD44366 | |
| Cry1Id2 | JQ228422 | Bt HD12 |
| Cry1Id3 | KJ619661 | Bt FH21 |
| Cry1Ie1 | AAG43526 | Bt BTC007 |
| Cry1Ie2 | HM439636 | Bt T03B001 |
| Cry1Ie3 | KC156647 | ARP058 |
| Cry1Ie4 | KC156681 | ARP131 |
| Cry1Ie5 | KJ710646 | BN23-5 |
| Cry1If1 | AAQ52382 | |
| Cry1Ig1 | KC156701 | ARP166 |
| Cry1I-like | AAC31094 | |
| Cry1I-like | ABG88859 | Bt ly4a3 |
| Cry1Ja1 | AAA22341 | Bt EG5847 |
| Cry1Ja2 | HM070030 | WBT-1 |
| Cry1Ja3 | JQ228425 | Bt FH21 |
| Cry1Jb1 | AAA98959 | Bt EG5092 |
| Cry1Jc1 | AAC31092 | |
| Cry1Jc2 | AAQ52372 | |
| Cry1Jd1 | CAC50779 | Bt |
| Cry1Ka1 | AAB00376 | Bt morrisoni BF190 |
| Cry1Ka2 | HQ439783 | Bt WBT-2 |
| Cry1La1 | AAS60191 | Bt kurstaki K1 |
| Cry1La2 | HM070031 | Bt SC6H8 |
| Cry1La3 | KT692983 | Bt GS27 |
| Cry1Ma1 | FJ884067 | LBIT 1189 |
| Cry1Ma2 | KC156659 | ARP080 |
| Cry1Na1 | KC156648 | ARP009 |
| Cry1Na2 | AEH31422 | Bt T03B001 |
| Cry1Na3 | AKQ08661 | Bt BRC-ZYR2 |
| Cry1Nb1 | KC156678 | ARP146 |
| Cry1-like | AAC31091 | |
| Cry2Aa1 | AAA22335 | Bt kurstaki |
| Cry2Aa2 | AAA83516 | Bt kurstaki HD1 |
| Cry2Aa3 | D86064 | Bt sotto |
| Cry2Aa4 | AAC04867 | Bt kenyae HD549 |
| Cry2Aa5 | CAA10671 | Bt SL39 |
| Cry2Aa6 | CAA10672 | Bt YZ71 |
| Cry2Aa7 | CAA10670 | Bt CY29 |
| Cry2Aa8 | AAO13734 | Bt Dongbei 66 |
| Cry2Aa9 | AAO13750 | |
| Cry2Aa10 | AAQ04263 | |
| Cry2Aa11 | AAQ52384 | |
| Cry2Aa12 | ABI83671 | Bt Rpp39 |
| Cry2Aa13 | ABL01536 | Bt 146-158-01 |
| Cry2Aa14 | ACF04939 | Bt HD-550 |
| Cry2Aa15 | JN426947 | Bt SSy77 |
| Cry2Aa16 | KF667522 | Bt V4 |
| Cry2Aa17 | KF860848 | |
| Cry2Aa18 | ANF99565 | Bt SY49.1 |
| Cry2Aa19 | MG983752 | Bt-T32 |
| Cry2Aa20 | MG983753 | Bt-T405 |
| Cry2Aa21 | MG983754 | Bt-T414 |
| Cry2Aa22 | MH475904 | Bt-T527 |
| Cry2Aa23 | MH475905 | Bt-T532 |
| Cry2Aa23 | MH475906 | Bt-T536 |
| Cry2Aa25 | MH475907 | Bt-T543 |
| Cry2Ab1 | AAA22342 | Bt kurstaki HD1 |
| Cry2Ab2 | CAA39075 | Bt kurstaki HD1 |
| Cry2Ab3 | AAG36762 | Bt BTC002 |
| Cry2Ab4 | AAO13296 | Bt B-Pr-88 |
| Cry2Ab5 | AAQ04609 | Bt ly30 |
| Cry2Ab6 | AAP59457 | Bt WZ-7 |
| Cry2Ab7 | AAZ66347 | Bt 14-1 |
| Cry2Ab8 | ABC95996 | Bt WB2 |
| Cry2Ab9 | ABC74968 | Bt LLB6 |
| Cry2Ab10 | ABM21766 | Bt LyL |
| Cry2Ab11 | CAM84575 | Bt CMBL-BT1 |
| Cry2Ab12 | ABM21764 | Bt LyD |
| Cry2Ab13 | ACG76120 | Bt ywc5-4 |
| Cry2Ab14 | ACG76121 | Bt Bts |
| Cry2Ab15 | HM037126 | Bt BF-4 |
| Cry2Ab16 | GQ866914 | SK-793 |
| Cry2Ab17 | HQ439789 | Bt PS9-C12 |
| Cry2Ab18 | JN135255 | |
| Cry2Ab19 | JN135256 | |
| Cry2Ab20 | JN135257 | |
| Cry2Ab21 | JN135258 | |
| Cry2Ab22 | JN135259 | |
| Cry2Ab23 | JN135260 | |
| Cry2Ab24 | JN135261 | |
| Cry2Ab25 | JN415485 | Btk MnD |
| Cry2Ab26 | JN426946 | Bt SSy77 |
| Cry2Ab27 | JN415764 | |
| Cry2Ab28 | JN651494 | Bt LTS-7 |
| Cry2Ab29 | KF860847 | |
| Cry2Ab30 | EU623976 | Bt LSZ9408 |
| Cry2Ab31 | AHM93475 | Bt HTS-S-38 |
| Cry2Ab32 | KJ710647 | BN23-5 |
| Cry2Ab33 | KP053646 | Bt CYZ-4 |
| Cry2Ab34 | KX236449 | Bt BJH406 |
| Cry2Ab35 | KY212748 | Bt YC-10 |
| Cry2Ab36 | MK391632 | MPU B5 |
| Cry2Ac1 | CAA40536 | Bt shanghai S1 |
| Cry2Ac2 | AAG35410 | |
| Cry2Ac3 | AAQ52385 | |
| Cry2Ac4 | ABC95997 | Bt WB9 |
| Cry2Ac5 | ABC74969 | |
| Cry2Ac6 | ABC74793 | Bt wuhanensis |
| Cry2Ac7 | CAL18690 | Bt SBSBT-1 |
| Cry2Ac8 | CAM09325 | Bt CMBL-BT1 |
| Cry2Ac9 | CAM09326 | Bt CMBL-BT2 |
| Cry2Ac10 | ABN15104 | Bt QCL-1 |
| Cry2Ac11 | CAM83895 | Bt HD29 |
| Cry2Ac12 | CAM83896 | Bt CMBL-BT3 |
| Cry2Ad1 | AAF09583 | Bt BR30 |
| Cry2Ad2 | ABC86927 | Bt WB10 |
| Cry2Ad3 | CAK29504 | Bt 5_2AcT(1) |
| Cry2Ad4 | CAM32331 | Bt CMBL-BT2 |
| Cry2Ad5 | CAO78739 | Bt HD29 |
| Cry2Ae1 | AAQ52362 | |
| Cry2Af1 | ABO30519 | Bt C81 |
| Cry2Af2 | GQ866915 | SK-758 |
| Cry2Ag1 | ACH91610 | Bt JF19-2 |
| Cry2Ah1 | EU939453 | Bt SC6H8 |
| Cry2Ah2 | ACL80665 | Bt BRC-ZQL3 |
| Cry2Ah3 | GU073380 | HYW-8 |
| Cry2Ah4 | KC156702 | ARP193 |
| Cry2Ah5 | KT692984 | Bt GS3 |
| Cry2Ah6 | KX034204 | |
| Cry2Ai1 | FJ788388 | Bt |
| Cry2Aj1 | | |
| Cry2Ak1 | KC156660 | ARP067 |
| Cry2Al1 | KJ149819 | Bt SWK1 |
| Cry2Ba1 | KC156658 | ARP026 |
| Cry2Ba2 | KF014123 | HD395 |
| Cry3Aa1 | AAA22336 | Bt san diego |
| Cry3Aa2 | AAA22541 | Bt tenebrionis |
| Cry3Aa3 | CAA68482 | |
| Cry3Aa4 | AAA22542 | Bt tenebrionis |
| Cry3Aa5 | AAA50255 | Bt morrisoni EG2158 |
| Cry3Aa6 | AAC43266 | Bt tenebrionis |
| Cry3Aa7 | CAB41411 | Bt 22 |
| Cry3Aa8 | AAS79487 | Bt YM-03 |
| Cry3Aa9 | AAW05659 | Bt UTD-001 |
| Cry3Aa10 | AAU29411 | Bt 886 |
| Cry3Aa11 | AAW82872 | Bt tenebrionis Mm2 |
| Cry3Aa12 | ABY49136 | Bt tenebrionis |
| Cry3Ba1 | CAA34983 | Bt tolworthi 43F |
| Cry3Ba2 | CAA00645 | Bt PGSI208 |
| Cry3Ba3 | JQ397327 | Bt ML090 |
| Cry3Bb1 | AAA22334 | Bt EG4961 |
| Cry3Bb2 | AAA74198 | Bt EG5144 |
| Cry3Bb3 | I15475 | |
| Cry3Ca1 | CAA42469 | Bt kurstaki BtI109P |
| Cry4Aa1 | CAA68485 | Bt israelensis |
| Cry4Aa2 | BAA00179 | Bt israelensis HD522 |
| Cry4Aa3 | CAD30148 | Bt israelensis |
| Cry4Aa4 | AFB18317 | Bti BRC-LLP29 |
| Cry4A-like | AAY96321 | Bt LDC-9 |
| Cry4Ba1 | CAA30312 | Bt israelensis 4Q2-72 |
| Cry4Ba2 | CAA30114 | Bt israelensis |
| Cry4Ba3 | AAA22337 | Bt israelensis |
| Cry4Ba4 | BAA00178 | Bt israelensis HD522 |
| Cry4Ba5 | CAD30095 | Bt israelensis |
| Cry4Ba-like | ABC47686 | Bt LDC-9 |
| Cry4Ca1 | EU646202 | Bt Y41 |
| Cry4Ca2 | KM053252 | Bt SK700 |
| Cry4Cb1 | FJ403208 | Bt HS18-1 |
| Cry4Cb2 | FJ597622 | Bt Ywc2-8 |
| Cry4Cb3 | AHG25301 | Bt S2160-1 |
| Cry4Cc1 | FJ403207 | Bt MC28 |
| Cry5Aa1 | AAA67694 | Bt darmstadiensis PS17 |
| Cry5Ab1 | AAA67693 | Bt darmstadiensis PS17 |
| Cry5Ac1 | I34543 | |
| Cry5Ad1 | ABQ82087 | Bt L366 |
| Cry5Ba1 | AAA68598 | Bt PS86Q3 |
| Cry5Ba2 | ABW88931 | YBT 1518 |
| Cry5Ba3 | AFJ04417 | Bt zjfc85 |
| Cry5Ca1 | HM461869 | Sbt003 |
| Cry5Ca2 | ZP_04123426 | Bt T13001 |
| Cry5Da1 | HM461870 | Sbt003 |
| Cry5Da2 | ZP_04123980 | Bt T13001 |
| Cry5Ea1 | HM485580 | Sbt003 |
| Cry5Ea2 | ZP_04124038 | Bt T13001 |
| Cry6Aa1 | AAA22357 | Bt PS52A1 |
| Cry6Aa2 | AAM46849 | YBT 1518 |
| Cry6Aa3 | ABH03377 | Bt 96418 |
| Cry6Ba1 | AAA22358 | Bt PS69D1 |
| Cry7Aa1 | AAA22351 | Bt galleriae PGSI245 |
| Cry7Aa2 | MK840959 | Bt BM311.1 |
| Cry7Ab1 | AAA21120 | Bt dakota HD511 |
| Cry7Ab2 | AAA21121 | Bt kumamotoensis 867 |
| Cry7Ab3 | ABX24522 | Bt WZ-9 |
| Cry7Ab4 | EU380678 | Bt HQ122 |
| Cry7Ab5 | ABX79555 | Bt monterrey GM-33 |
| Cry7Ab6 | ACI44005 | Bt HQ122 |
| Cry7Ab7 | ADB89216 | Bt GW6 |
| Cry7Ab8 | GU145299 | |
| Cry7Ab9 | ADD92572 | Bt QG-121 |
| Cry7Ac1 | KJ789922 | Bt QZL20-1 |
| Cry7Ba1 | ABB70817 | Bt huazhongensis |
| Cry7Bb1 | KC156653 | ARP013 |
| Cry7Ca1 | ABR67863 | Bt BTH-13 |
| Cry7Cb1 | KC156698 | ARP269 |
| Cry7Da1 | ACQ99547 | Bt LH-2 |
| Cry7Da2 | HM572236 | |
| Cry7Da3 | KC156679 | ARP140 |
| Cry7Ea1 | HM035086 | Sbt009 |
| Cry7Ea2 | HM132124 | HD868(D8) |
| Cry7Ea3 | EEM19403 | BGSC 4Y1 |
| Cry7Fa1 | HM035088 | SBt009 |
| Cry7Fa2 | EEM 19090 | BGSC 4Y1 |
| Cry7Fb1 | HM572235 | Bt |
| Cry7Fb2 | KC156682 | ARP162 |
| Cry7Fb3 | HM572235 | |
| Cry7Ga1 | HM572237 | Bt |
| Cry7Ga2 | KC156669 | ARP103 |
| Cry7Gb1 | KC156650 | ARP011 |
| Cry7Gc1 | KC156654 | ARP012 |
| Cry7Gd1 | KC156697 | ARP271 |
| Cry7Ha1 | KC156651 | ARP021 |
| Cry7Ia1 | KC156665 | ARP112 |
| Cry7Ja1 | KC156671 | ARP114 |
| Cry7Ka1 | KC156680 | ARP171 |
| Cry7Kb1 | BAM99306 | Bt dakota |
| Cry7La1 | BAM99307 | Bt dakota |
| Cry8Aa1 | AAA21117 | Bt kumamotoensis |
| Cry8Ab1 | EU044830 | Bt B-JJX |
| Cry8Ac1 | KC156662 | ARP068 |
| Cry8Ad1 | KC156684 | ARP215 |
| Cry8Ba1 | AAA21118 | Bt kumamotoensis |
| Cry8Bb1 | CAD57542 | |
| Cry8Bc1 | CAD57543 | |
| Cry8Ca1 | AAA21119 | Bt japonensis Buibui |
| Cry8Ca2 | AAR98783 | Bt HBF-1 |
| Cry8Ca3 | EU625349 | Bt FTL-23 |
| Cry8Ca4 | ADB54826 | Bt S185 |
| Cry8Ca5 | MK167020 | Bt BJH500 |
| Cry8Da1 | BAC07226 | Bt galleriae |
| Cry8Da2 | BD133574 | Bt |
| Cry8Da3 | BD133575 | Bt |
| Cry8Db1 | BAF93483 | Bt BBT2-5 |
| Cry8Ea1 | AAQ73470 | Bt 185 |
| Cry8Ea2 | EU047597 | Bt B-DLL |
| Cry8Ea3 | KC855216 | Bt GWL |
| Cry8Ea4 | AGM16383 | QZL144-1 |
| Cry8Ea5 | AGM16384 | QZL144-4 |
| Cry8Ea6 | KT692742 | ZK1 |
| Cry8Fa1 | AAT48690 | Bt 185 |
| Cry8Fa2 | HQ174208 | Bt DLL |
| Cry8Fa3 | AFH78109 | Bt L-27 |
| Cry8Fa4 | AGM16382 | QHW7-2 |
| Cry8Ga1 | AAT46073 | Bt HBF-18 |
| Cry8Ga2 | ABC42043 | Bt 145 |
| Cry8Ga3 | FJ198072 | Bt FCD114 |
| Cry8Ha1 | AAW81032 | Bt 185 |
| Cry8Hb1 | KP713881 | Bt |
| Cry8Ia1 | EU381044 | Bt su4 |
| Cry8Ia2 | GU073381 | Bt HW-11 |
| Cry8Ia3 | HM044664 | Sbt030 |
| Cry8Ia4 | KC156674 | ARP124 |
| Cry8Ib1 | GU325772 | Bt F4 |
| Cry8Ib2 | KC156677 | ARP135 |
| Cry8Ib3 | AHG25076 | Bt TS3 |
| Cry8Ja1 | EU625348 | Bt FPT-2 |
| Cry8Ka1 | FJ422558 | |
| Cry8Ka2 | ACN87262 | Bt kenyae |
| Cry8Ka3 | AGM16381 | QHW7-2 |
| Cry8Kb1 | HM123758 | ST8 |
| Cry8Kb2 | KC156675 | ARP158 |
| Cry8Kb3 | KJ123823 | INTA Fr7-4 |
| Cry8La1 | GU325771 | Bt F4 |
| Cry8Ma1 | | Sbt016 |
| Cry8Ma2 | EEM86551 | BGSC 4CC1 |
| Cry8Ma3 | HM210574 | NARC Bt17 (C6) |
| Cry8Na1 | HM640939 | BtQ52-7 |
| Cry8Pa1 | HQ388415 | Bt ST8 |
| Cry8Pa2 | HQ413324 | Bt QCM(T1) |
| Cry8Pa3 | KJ123823 | INTA Fr7-4 |
| Cry8Qa1 | HQ441166 | Bt ST8 |
| Cry8Qa2 | KC152468 | Bt INTA Fr7-4 |
| Cry8Ra1 | AFP87548 | Bt R36 |
| Cry8Sa1 | JQ740599 | Bt Strain 62 |
| Cry8Ta1 | KC156673 | ARP110 |
| Cry8-like | FJ770571 | Bt canadensis |
| Cry8-like | ABS53003 | Bt |
| Cry9Aa1 | CAA41122 | Bt galleriae |
| Cry9Aa2 | CAA41425 | Bt DSIR517 |
| Cry9Aa3 | GQ249293 | Bt SC5(D2) |
| Cry9Aa4 | GQ249294 | Bt T03C001 |
| Cry9Aa5 | JX174110 | BGSN1 |
| Cry9Aa like | AAQ52376 | |
| Cry9Ba1 | CAA52927 | Bt galleriae |
| Cry9Ba2 | GU299522 | Bt B-SC5 |
| Cry9Bb1 | AAV28716 | Bt japonensis |
| Cry9Ca1 | CAA85764 | Bt tolworthi |
| Cry9Ca2 | AAQ52375 | |
| Cry9Cb1 | MK005301 | |
| Cry9Da1 | BAA19948 | Bt japonensis N141 |
| Cry9Da2 | AAB97923 | Bt japonensis |
| Cry9Da3 | GQ249293 | Bt SC5 (D2) |
| Cry9Da4 | GQ249297 | Bt T03B001 |
| Cry9Db1 | AAX78439 | Bt kurstaki DP 1019 |
| Cry9Dc1 | KC156683 | ARP168 |
| Cry9Ea1 | BAA34908 | Bt aizawai SSK-10 |
| Cry9Ea2 | AAO12908 | Bt B-Hm-16 |
| Cry9Ea3 | ABM21765 | Bt lyA |
| Cry9Ea4 | ACE88267 | Bt ywc5-4 |
| Cry9Ea5 | ACF04743 | Bts |
| Cry9Ea6 | ACG63872 | Bt 11 |
| Cry9Ea7 | FJ380927 | Bt 4 |
| Cry9Ea8 | GQ249292 | Bt SC5(E8) |
| Cry9Ea9 | JN651495 | Bt LTS-7 |
| Cry9Ea10 | KT692743 | ZK2 |
| Cry9Ea11 | MK391633 | Bt MPU B9 |
| Cry9Eb1 | CAC50780 | |
| Cry9Eb2 | GQ249298 | BtT23001 |
| Cry9Eb3 | KC156646 | ARP057 |
| Cry9Ec1 | AAC63366 | Bt galleriae |
| Cry9Ed1 | AAX78440 | Bt kurstaki DP 1019 |
| Cry9Ee1 | GQ249296 | Bt T03B001 |
| Cry9Ee2 | KC156664 | ARP095 |
| Cry9Fa1 | KC156692 | ARP212 |
| Cry9Ga1 | KC156699 | ARP 188 |
| Cry9-like | AAC63366 | Bt galleriae |
| Cry10Aa1 | AAA22614 | Bt israelensis |
| Cry10Aa2 | E00614 | Bt israelensis ONR-60A |
| Cry10Aa3 | CAD30098 | Bt israelensis |
| Cry10Aa4 | AFB18318 | Bti BRC-LLP29 |
| Cry10A-like | DQ167578 | Bt LDC-9 |
| Cry11Aa1 | AAA22352 | Bt israelensis |
| Cry11Aa2 | AAA22611 | Bt israelensis |
| Cry11Aa3 | CAD30081 | Bt israelensis |
| Cry11Aa4 | AFB18319 | Bti BRC-LLP29 |
| Cry11Aa5 | MH253686 | |
| Cry11Aa-like | DQ166531 | Bt LDC-9 |
| Cry11Ba1 | CAA60504 | Bt jegathesan 367 |
| Cry11Bb1 | AAC97162 | Bt medellin |
| Cry11Bb2 | HM068615 | Bt K34 |
| Cry12Aa1 | AAA22355 | Bt PS33F2 |
| Cry13Aa1 | AAA22356 | Bt PS63B |
| Cry13Aa2 | CP015350 | Bt MYBT18246 |
| Cry14Aa1 | AAA21516 | Bt sotto PS80JJ1 |
| Cry14Ab1 | KC156652 | ARP001 |
| Cry15Aa1 | AAA22333 | Bt thompsoni |
| Cry16Aa1 | CAA63860 | Cb malaysia CH18 |
| Cry17Aa1 | CAA67841 | Cb malaysia CH18 |
| Cry18Aa1 | CAA67506 | Paenibacillus popilliae |
| Cry18Ba1 | AAF89667 | Paenibacillus popilliae |
| Cry18Ca1 | AAF89668 | Paenibacillus popilliae |
| Cry19Aa1 | CAA68875 | Bt jegathesan 367 |
| Cry19Ba1 | BAA32397 | Bt higo |
| Cry19Ca1 | AFM37572 | BGSC 4CE1 |
| Cry20Aa1 | AAB93476 | Bt fukuokaensis |
| Cry20Ba1 | ACS93601 | Bt higo LBIT-976 |
| Cry20Ba2 | KC156694 | ARP192 |
| Cry20-like | GQ144333 | Bt Y-5 |
| Cry21Aa1 | I32932 | |
| Cry21Aa2 | I66477 | |
| Cry21Aa3 | MF893204 | |
| Cry21Ba1 | BAC06484 | Bt roskildiensis |
| Cry21Ca1 | JF521577 | |
| Cry21Ca2 | KC156687 | ARP258 |
| Cry21Da1 | JF521578 | Sbt072 |
| Cry21Ea1 | KC865049 | |
| Cry21Fa1 | KF701307 | DB27 |
| Cry21Ga1 | KF771885 | DB27 |
| Cry21Ha1 | KF771886 | DB27 |
| Cry22Aa1 | I34547 | |
| Cry22Aa2 | CAD43579 | Bt |
| Cry22Aa3 | ACD93211 | Bt FZ-4 |
| Cry22Ab1 | AAK50456 | Bt EG4140 |
| Cry22Ab2 | CAD43577 | Bt |
| Cry22Ba1 | CAD43578 | Bt |
| Cry22Bb1 | KC156672 | ARP148 |
| Cry23Aa1 | AAF76375 | Bt |
| Cry24Aa1 | AAC61891 | Bt jegathesan |
| Cry24Ba1 | BAD32657 | Bt sotto |
| Cry24Ca1 | CAJ43600 | Bt FCC-41 |
| Cry24Da1 | KJ439561 | BLB32 |
| Cry25Aa1 | AAC61892 | Bt jegathesan |
| Cry26Aa1 | AAD25075 | Bt finitimus B-1166 |
| Cry27Aa1 | BAA82796 | Bt higo |
| Cry28Aa1 | AAD24189 | Bt finitimus B-161 |
| Cry28Aa2 | AAG00235 | Bt finitimus |
| Cry29Aa1 | CAC80985 | Bt medellin |
| Cry29Ba1 | KC865046 | |
| Cry30Aa1 | CAC80986 | Bt medellin |
| Cry30Ba1 | BAD00052 | Bt entomocidus |
| Cry30Ca1 | BAD67157 | Bt sotto |
| Cry30Ca2 | ACU24781 | Bt jegathesan 367 |
| Cry30Da1 | EF095955 | Bt Y41 |
| Cry30Db1 | BAE80088 | Bt aizawai BUN 1-14 |
| Cry30Ea1 | ACC95445 | Bt S2160-1 |
| Cry30Ea2 | FJ499389 | Bt Ywc2-8 |
| Cry30Ea3 | FJ527836 | Bt Hs18-1 |
| Cry30Ea4 | KJ740649 | BN15-6 |
| Cry30Fa1 | ACI22625 | Bt MC28 |
| Cry30Ga1 | ACG60020 | Bt HS18-1 |
| Cry30Ga2 | HQ638217 | Bt S2160-1 |
| Cry31Aa1 | BAB11757 | Bt 84-HS-1-11 |
| Cry31Aa2 | AAL87458 | Bt M15 |
| Cry31Aa3 | BAE79808 | Bt B0195 |
| Cry31Aa4 | BAF32571 | Bt 79-25 |
| Cry31Aa5 | BAF32572 | Bt 92-10 |
| Cry31Aa6 | BAI44026 | M019 |
| Cry31Ab1 | BAE79809 | Bt B0195 |
| Cry31Ab2 | BAF32570 | Bt 31-5 |
| Cry31Ac1 | BAF34368 | Bt 87-29 |
| Cry31Ac2 | AB731600 | Bt B0462 |
| Cry31Ad1 | BAI44022 | Bt MO19 |
| Cry31Ad2 | AGO57767 | Bt 64-1-94 |
| Cry32Aa1 | AAG36711 | Bt yunnanensis |
| Cry32Aa2 | GU063849 | Bt FBG-1 |
| Cry32Ab1 | GU063850 | Bt FZ-2 |
| Cry32Ba1 | BAB78601 | Bt |
| Cry32Ca1 | BAB78602 | Bt |
| Cry32Cb1 | KC156708 | ARP227 |
| Cry32Da1 | BAB78603 | Bt |
| Cry32Ea1 | GU324274 | Bt HYD-3 |
| Cry32Ea2 | KC156686 | ARP239 |
| Cry32Eb1 | KC156663 | ARP092 |
| Cry32Fa1 | KC156656 | ARP055 |
| Cry32Ga1 | KC156657 | ARP052 |
| Cry32Ha1 | KC156661 | ARP076 |
| Cry32Hb1 | KC156666 | ARP096 |
| Cry32Ia1 | KC156667 | ARP104 |
| Cry32Ja1 | KC156685 | ARP262 |
| Cry32Ka1 | KC156688 | ARP259 |
| Cry32La1 | KC156689 | ARP203 |
| Cry32Ma1 | KC156690 | ARP256 |
| Cry32Mb1 | KC156704 | ARP242 |
| Cry32Na1 | KC156691 | ARP179 |
| Cry320a1 | KC156703 | ARP218 |
| Cry32Pa1 | KC156705 | ARP277 |
| Cry32Qa1 | KC156706 | ARP174 |
| Cry32Ra1 | KC156707 | ARP229 |
| Cry32Sa1 | KC156709 | ARP185 |
| Cry32Ta1 | KC156710 | ARP220 |
| Cry32Ua1 | KC156655 | ARP050 |
| Cry32Va1 | | LM1212 |
| Cry32Wa1 | | LM1212 |
| Cry32Wa2 | AHN52957 | Bt B3 |
| Cry32Xa1 | KX094974 | |
| Cry32Ya1 | KX094973 | |
| Cry33Aa1 | AAL26871 | Bt dakota |
| Cry34Aa1 | AAG50341 | Bt PS80JJ1 |
| Cry34Aa2 | AAK64560 | Bt EG5899 |
| Cry34Aa3 | AAT29032 | Bt PS69Q |
| Cry34Aa4 | AAT29030 | Bt PS185GG |
| Cry34Ab1 | AAG41671 | Bt PS149B1 |
| Cry34Ac1 | AAG50118 | Bt PS167H2 |
| Cry34Ac2 | AAK64562 | Bt EG9444 |
| Cry34Ac3 | AAT29029 | Bt KR1369 |
| Cry34Ba1 | AAK64565 | Bt EG4851 |
| Cry34Ba2 | AAT29033 | Bt PS201L3 |
| Cry34Ba3 | AAT29031 | Bt PS201HH2 |
| Cry35Aa1 | AAG50342 | Bt PS80JJ1 |
| Cry35Aa2 | AAK64561 | Bt EG5899 |
| Cry35Aa3 | AAT29028 | Bt PS69Q |
| Cry35Aa4 | AAT29025 | Bt PS185GG |
| Cry35Ab1 | AAG41672 | Bt PS149B1 |
| Cry35Ab2 | AAK64563 | Bt EG9444 |
| Cry35Ab3 | AY536891 | Bt KR1369 |
| Cry35Ac1 | AAG50117 | Bt PS167H2 |
| Cry35Ba1 | AAK64566 | Bt EG4851 |
| Cry35Ba2 | AAT29027 | Bt PS201L3 |
| Cry35Ba3 | AAT29026 | Bt PS201HH2 |
| Cry36Aa1 | AAK64558 | Bt |
| Cry37Aa1 | AAF76376 | Bt |
| Cry38Aa1 | AAK64559 | Bt |
| Cry39Aa1 | BAB72016 | Bt aizawai |
| Cry40Aa1 | BAB72018 | Bt aizawai |
| Cry40Ba1 | BAC77648 | Bun1-14 |
| Cry40Ca1 | EU381045 | Bt Y41 |
| Cry40Da1 | ACF15199 | Bt S2096-2 |
| Cry41Aa1 | BAD35157 | Bt A1462 |
| Cry41Ab1 | BAD35163 | Bt A1462 |
| Cry41Ba1 | HM461871 | Sbt021 |
| Cry41Ba2 | ZP_04099652 | BGSC 4AW1 |
| Cry41Ca1 | | LM1212 |
| Cry42Aa1 | BAD35166 | Bt A1462 |
| Cry43Aa1 | BAD15301 | P. lentimorbus semadara |
| Cry43Aa2 | BAD95474 | P. popilliae popilliae |
| Cry43Ba1 | BAD15303 | P. lentimorbus semadara |
| Cry43Ca1 | KC156676 | ARP132 |
| Cry43Cb1 | KC156695 | ARP252 |
| Cry43Cc1 | KC156696 | ARP191 |
| Cry43-like | BAD15305 | P. lentimorbus semadara |
| Cry44Aa1 | BAD08532 | Bt entomocidus INA288 |
| Cry45Aa1 | BAD22577 | Bt 89-T-34-22 |
| Cry45Ba1 | | LM1212 |
| Cry46Aa1 | BAC79010 | Bt dakota |
| Cry46Aa2 | BAG68906 | Bt A1470 |
| Cry46Ab1 | BAD35170 | Bt |
| Cry47Aa1 | AAY24695 | Bt CAA890 |
| Cry48Aa1 | CAJ18351 | Bs IAB59 |
| Cry48Aa2 | CAJ86545 | Bs 47-6B |
| Cry48Aa3 | CAJ86546 | Bs NHA15b |
| Cry48Ab1 | CAJ86548 | Bs LP1G |
| Cry48Ab2 | CAJ86549 | Bs 2173 |
| Cry49Aa1 | CAH56541 | Bs IAB59 |
| Cry49Aa2 | CAJ86541 | Bs 47-6B |
| Cry49Aa3 | CAJ86543 | BsNHA15b |
| Cry49Aa4 | CAJ86544 | Bs 2173 |
| Cry49Ab1 | CAJ86542 | Bs LP1G |
| Cry50Aa1 | BAE86999 | Bt sotto |
| Cry50Ba1 | GU446675 | Bt S2160-1 |
| Cry50Ba2 | GU446676 | Bt S3161-3 |
| Cry51Aa1 | ABI14444 | Bt F14-l |
| Cry51Aa2 | GU570697 | EG2934 |
| Cry52Aa1 | EF613489 | Bt Y41 |
| Cry52Ba1 | FJ361760 | Bt BM59-2 |
| Cry52Ca1 | KM053253 | Bt SK700 |
| Cry53Aa1 | EF633476 | Bt Y41 |
| Cry53Ab1 | FJ361759 | Bt MC28 |
| Cry54Aa1 | ACA52194 | Bt MC28 |
| Cry54Aa2 | GQ140349 | Bt FBG25 |
| Cry54Ab1 | JQ916908 | Bt MC28 |
| Cry54Ba1 | GU446677 | Bt S2160-1 |
| Cry54Ba2 | KJ740650 | BN15-6 |
| Cry55Aa1 | ABW88932 | YBT 1518 |
| Cry55Aa2 | AAE33526 | Bt Y41 |
| Cry55Aa3 | HG764207 | Bt T44 |
| Cry56Aa1 | ACU57499 | Bt Ywc2-8 |
| Cry56Aa2 | GQ483512 | Bt G7-1 |
| Cry56Aa3 | JX025567 | Bt HS18-1 |
| Cry56Aa4 | KJ740651 | BN7-5 |
| Cry57Aa1 | ACN87261 | Bt kim |
| Cry57Ab1 | KF638650 | Bt LTS290 |
| Cry58Aa1 | ACN87260 | Bt entomocidus |
| Cry59Ba1 | JN790647 | Bt Bm59-2 |
| Cry59Aa1 | ACR43758 | Bt kim LBIT-980 |
| Cry60Aa1 | ACU24782 | Bt jegathesan |
| Cry60Aa2 | EAO57254 | Bt israelensis |
| Cry60Aa3 | EEM99278 | Bt IBL 4222 |
| Cry60Ba1 | GU810818 | Bt malayensis |
| Cry60Ba2 | EAO57253 | Bt israelensis |
| Cry60Ba3 | EEM99279 | Bt IBL 4222 |
| Cry61Aa1 | HM035087 | Sbt009 |
| Cry61Aa2 | HM132125 | HD868 (E5) |
| Cry61Aa3 | EEM19308 | BGSC 4Y1 |
| Cry62Aa1 | HM054509 | ST7 |
| Cry63Aa1 | BAI44028 | MO19 |
| Cry64Aa1 | BAJ05397 | Bt tohokuensis |
| Cry64Ba1 | AGT29559 | BT 210-8-45 |
| Cry64Ca1 | AGT29560 | BT 210-8-45 |
| Cry65Aa1 | HM461868 | SBt 003 |
| Cry65Aa2 | ZP_04123838 | T13001 |
| Cry66Aa1 | AEB52311 | SBt 021 |
| Cry66Aa2 | ZP_04099945 | BGSC 4AW1 |
| Cry67Aa1 | HM485582 | SBt 009 |
| Cry67Aa2 | ZP_04148882 | BGSC 4Y1 |
| Cry68Aa1 | HQ113114 | Bt MC28 |
| Cry69Aa1 | HQ401006 | Bt MC28 |
| Cry69Aa2 | JQ821388 | Bt MC28 |
| Cry69Ab1 | JN209957 | Bt hs18-1 |
| Cry70Aa1 | JN646781 | Bt hs18-1 |
| Cry70Ba1 | AD051070 | Bt MC28 |
| Cry70Bb1 | EEL67276 | Be AH603 |
| Cry71Aa1 | JX025568 | Bt Hs18-1 |
| Cry72Aa1 | JX025569 | Bt Hs18-1 |
| Cry72Aa2 | KX094975 | |
| Cry73Aa1 | AEH76822 | Sbt Sbt029 |
| Cry74Aa | | LM1212 |
| Cry75Aa1 | ASY04853 | Bl EG5553 |
| Cry75Aa2 | ASY04852 | Bl EG5551 |
| Cry75Aa3 | ASY04851 | Bl EG5552 |
| Cry76Aa1 | MH810248 | |
| Cry77Aa1 | MH810249 | |
| Cry78Aa1 | KY780623 | Bt C9F1 |

[0809] In some embodiments, a PFIP can be one or more of the following Cyt proteins: Cyt1Aa1, Cyt1Aa2, Cyt1Aa3, Cyt1Aa4, Cyt1Aa5, Cyt1Aa6, Cyt1Aa7, Cyt1Aa8, Cyt1Aa-like, Cyt1Ab1, Cyt1Ba1, Cyt1Ca1, Cyt1Da1, Cyt1Da2, Cyt2Aa1, Cyt2Aa2, Cyt2Aa3, Cyt2Aa4, Cyt2Ba1, Cyt2Ba2, Cyt2Ba3, Cyt2Ba4, Cyt2Ba5, Cyt2Ba6, Cyt2Ba7, Cyt2Ba8, Cyt2Ba9, Cyt2Ba10, Cyt2Ba11, Cyt2Ba12, Cyt2Ba13, Cyt2Ba14, Cyt2Ba15, Cyt2Ba16, Cyt2Ba-like, Cyt2Bb1, Cyt2Bc1, Cyt2B-like, Cyt2Ca1, and/or Cyt3Aa1.

[0810] In some embodiments, a mixture comprising one or more PFIPs and one or more CRIPs, can have one or more of the PFIPs be a Cyt toxin as described herein, or presented in Table 8.

TABLE 8
Non-limiting examples of Cyt toxins, their accession numbers
on NCBI, and strain. Here, if a cell is left blank, then
the accession number and/or strain is not applicable.

| Name | NCBI Accession No. | Strain/Other ID |
|---|---|---|
| Cyt1Aa1 | X03182 | Bt israelensis |
| Cyt1Aa2 | X04338 | Bt israelensis |
| Cyt1Aa3 | Y00135 | Bt morrisoni PG14 |
| Cyt1Aa4 | M35968 | Bt morrisoni PG14 |
| Cyt1Aa5 | AL731825 | Bt israelensis |
| Cyt1Aa6 | ABC17640 | Bt LLP29 |
| Cyt1Aa7 | KF152888 | Bt BRC-HQY1 |
| Cyt1Aa8 | MF893205 | |
| Cyt1Aa-like | ABB01172 | Bt LDC-9 |
| Cyt1Ab1 | X98793 | Bt medellin |
| Cyt1Ba1 | U37196 | Bt neoleoensis |
| Cyt1Ca1 | AL731825 | Bt israelensis |
| Cyt1Da1 | HQ113115 | Bt MC28 |
| Cyt1Da2 | JN226105 | hs18-1 |
| Cyt2Aa1 | Z14147 | Bt kyushuensis |
| Cyt2Aa2 | AF472606 | Bt darmstadiensis73E10 |
| Cyt2Aa3 | EU835185 | Bt MC28 |
| Cyt2Aa4 | AEG19547 | BtWFS-97 |
| Cyt2Ba1 | U52043 | Bt israelensis 4Q2 |
| Cyt2Ba2 | AF020789 | Bt israelensis PG14 |
| Cyt2Ba3 | AF022884 | Bt fuokukaensis |
| Cyt2Ba4 | AF022885 | Bt morrisoni HD12 |
| Cyt2Ba5 | AF022886 | Bt morrisoni HD518 |
| Cyt2Ba6 | AF034926 | Bt tenebrionis |
| Cyt2Ba7 | AF215645 | Bt T301 |
| Cyt2Ba8 | AF215646 | Bt T36 |
| Cyt2Ba9 | AL731825 | Bt israelensis |
| Cyt2Ba10 | ACX54358 | Bti HD 567 |
| Cyt2Ba11 | ACX54359 | Bti HD 522 |
| Cyt2Ba12 | ACX54360 | Bti INTA H41-1 |
| Cyt2Ba13 | FJ205865 | INTA 160-2 |
| Cyt2Ba14 | FJ205866 | Bti IPS82 |
| Cyt2Ba15 | JF283552 | Bt LLP29 |
| Cyt2Ba16 | MG181950 | QL32-1 |
| Cyt2Ba-like | ABE99695 | Bt LDC-9 |
| Cyt2Bb1 | U82519 | Bt jegathesan |
| Cyt2Bc1 | CAC80987 | Bt medellin |
| Cyt2B-like | DQ341380 | |
| Cyt2Ca1 | AAK50455 | Bt |
| Cyt3Aa1 | HM596591 | Bt TD516 |

[0811] In some embodiments, a PFIP can be a protein belonging to the Vip1, Vip2, Vip3, or Vip4 family. For example, in some embodiments, a PFIP can be one or more of the following Vip proteins: Vip1Aa1, Vip1Aa2, Vip1Aa3, Vip1Ab1, Vip1Ac1, Vip1Ad1, Vip1Ba1, Vip1Ba2, Vip1Bb1, Vip1Bb2, Vip1Bb3, Vip1Bc1, Vip1Ca1, Vip1Ca2, Vip1Da1, Vip2Aa1, Vip2Aa2, Vip2Aa3, Vip2Ab1, Vip2Ac1, Vip2Ac2, Vip2Ad1, Vip2Ae1, Vip2Ae2, Vip2Ae3, Vip2Af1, Vip2Af2, Vip2Ag1, Vip2Ag2, Vip2Ba1, Vip2Ba2, Vip2Bb1, Vip2Bb2, Vip2Bb3, Vip2Bb4, Vip3Aa1, Vip3Aa2, Vip3Aa3, Vip3Aa4, Vip3Aa5, Vip3Aa6, Vip3Aa7, Vip3Aa8, Vip3Aa9, Vip3Aa10, Vip3Aa11, Vip3Aa12, Vip3Aa13, Vip3Aa14, Vip3Aa15, Vip3Aa16, Vip3Aa17, Vip3Aa18, Vip3Aa19.0, Vip3Aa19, Vip3Aa20, Vip3Aa21, Vip3Aa22, Vip3Aa23, Vip3Aa24, Vip3Aa25, Vip3Aa26, Vip3Aa27, Vip3Aa28, Vip3Aa29, Vip3Aa30, Vip3Aa31, Vip3Aa32, Vip3Aa33, Vip3Aa34, Vip3Aa35, Vip3Aa36, Vip3Aa37, Vip3Aa38, Vip3Aa39, Vip3Aa40, Vip3Aa41, Vip3Aa42, Vip3Aa43, Vip3Aa44, Vip3Aa45, Vip3Aa46, Vip3Aa47, Vip3Aa48, Vip3Aa49, Vip3Aa50, Vip3Aa51, Vip3Aa52, Vip3Aa53, Vip3Aa54, Vip3Aa55, Vip3Aa56, Vip3Aa57, Vip3Aa58, Vip3Aa59, Vip3Aa60, Vip3Aa61, Vip3Aa62, Vip3Aa63, Vip3Aa64, Vip3Aa65, Vip3Aa66, Vip3Ab1, Vip3Ab2, Vip3Ac1, Vip3Ad1, Vip3Ad2, Vip3Ad3, Vip3Ad4, Vip3Ad5, Vip3Ad6, Vip3Ae1, Vip3Af1, Vip3Af2, Vip3Af3, Vip3Af4, Vip3Ag1, Vip3Ag2, Vip3Ag3, Vip3Ag4, Vip3Ag5, Vip3Ag6, Vip3Ag7, Vip3Ag8, Vip3Ag9, Vip3Ag10, Vip3Ag11, Vip3Ag12, Vip3Ag13, Vip3Ag14, Vip3Ag15, Vip3Ah1, Vip3Ah2, Vip3Ai1, Vip3Aj1, Vip3Aj2, Vip3Ba1, Vip3Ba2, Vip3Bb1, Vip3Bb2, Vip3Bb3, Vip3Bc, Vip3Ca1, Vip3Ca2, Vip3Ca3, Vip3Ca4, and/or Vip4Aa1.

[0812] In some embodiments, a mixture comprising one or more PFIPs and one or more CRIPs, can have one or more of the PFIPs be a Vip protein as described herein, or presented in Table 9.

TABLE 9
Non-limiting examples of Vip proteins and their accession
numbers on NCBI. Here, if a cell is left blank, then
the accession number is not applicable.

| Name | NCBI Accession No. |
|---|---|
| Vip1Aa1 | |
| Vip1Aa2 | AAR81088 |
| Vip1Aa3 | GU992203 |
| Vip1Ab1 | |
| Vip1Ac1 | HM439098 |
| Vip1Ad1 | AGC08395 |
| Vip1Ba1 | AAR40886 |
| Vip1Ba2 | CAI43278 |
| Vip1Bb1 | AAR40282 |
| Vip1Bb2 | HM485584 |
| Vip1Bb3 | KR065727 |
| Vip1Bc1 | HM485583 |
| Vip1Ca1 | AAO86514 |
| Vip1Ca2 | KR065725 |
| Vip1Da1 | CAI40767 |
| Vip2Aa1 | 1QS1A |
| Vip2Aa2 | AAR81096 |
| Vip2Aa3 | HM439097 |
| Vip2Ab1 | |
| Vip2Ac1 | AAO86513 |
| Vip2Ac2 | KR065726 |
| Vip2Ad1 | CAI40768 |
| Vip2Ae1 | EF442245 |
| Vip2Ae2 | ACH42758 |
| Vip2Ae3 | HM439099 |
| Vip2Af1 | ACH42759 |
| Vip2Af2 | EU909204 |
| Vip2Ag1 | AGC08396 |
| Vip2Ag2 | KC951878 |
| Vip2Ba1 | AAR40887 |
| Vip2Ba2 | CAI43279 |
| Vip2Bb1 | |
| Vip2Bb2 | HM485585 |
| Vip2Bb3 | KJ868170 |
| Vip2Bb4 | KR065728 |
| Vip3Aa1 | AAC37036 |
| Vip3Aa2 | AAC37037 |
| Vip3Aa3 | |
| Vip3Aa4 | AAR81079 |
| Vip3Aa5 | AAR81080 |
| Vip3Aa6 | AAR81081 |
| Vip3Aa7 | AAK95326 |
| Vip3Aa8 | AAK97481 |
| Vip3Aa9 | CAA76665 |
| Vip3Aa10 | AAN60738 |
| Vip3Aa11 | AAR36859 |
| Vip3Aa12 | AAM22456 |
| Vip3Aa13 | AAL69542 |
| Vip3Aa14 | AAQ12340 |
| Vip3Aa15 | AAP51131 |
| Vip3Aa16 | AAW65132 |
| Vip3Aa17 | |
| Vip3Aa18 | AAX49395 |
| Vip3Aa19.0 | DQ241674 |
| Vip3Aa19 | DQ539887 |
| Vip3Aa20 | DQ539888 |
| Vip3Aa21 | ABD84410 |
| Vip3Aa22 | AAY41427 |
| Vip3Aa23 | AAY41428 |
| Vip3Aa24 | BI 880913 |
| Vip3Aa25 | EF608501 |
| Vip3Aa26 | EU294496 |
| Vip3Aa27 | EU332167 |
| Vip3Aa28 | FJ494817 |
| Vip3Aa29 | FJ626674 |
| Vip3Aa30 | FJ626675 |
| Vip3Aa31 | FJ626676 |
| Vip3Aa32 | FJ626677 |
| Vip3Aa33 | GU073128 |
| Vip3Aa34 | GU073129 |
| Vip3Aa35 | GU733921 |
| Vip3Aa36 | GU951510 |
| Vip3Aa37 | HM132041 |
| Vip3Aa38 | HM117632 |
| Vip3Aa39 | HM117631 |
| Vip3Aa40 | HM132042 |
| Vip3Aa41 | HM132043 |
| Vip3Aa42 | HQ587048 |
| Vip3Aa43 | HQ594534 |
| Vip3Aa44 | HQ650163 |
| Vip3Aa45 | JF710269 |
| Vip3Aa46 | JQ228436 |
| Vip3Aa47 | JQ228435 |
| Vip3Aa48 | JQ731616 |
| Vip3Aa49 | JQ731617 |
| Vip3Aa50 | JQ946639 |
| Vip3Aa51 | KC156649 |
| Vip3Aa52 | KF826718 |
| Vip3Aa53 | KF826723 |
| Vip3Aa54 | AHK23264 |
| Vip3Aa55 | KJ868172 |
| Vip3Aa56 | LN624748 |
| Vip3Aa57 | AJD18609 |
| Vip3Aa58 | KR259139 |
| Vip3Aa59 | KR259140 |
| Vip3Aa60 | KR340473 |
| Vip3Aa61 | KU522245 |
| Vip3Aa62 | KT792883 |
| Vip3Aa63 | KY780302 |
| Vip3Aa64 | KY883694 |
| Vip3Aa65 | MH290720 |
| Vip3Aa66 | MK252100 |
| Vip3Ab1 | AAR40284 |
| Vip3Ab2 | AAY88247 |
| Vip3Ac1 | |
| Vip3Ad1 | |
| Vip3Ad2 | CAI43276 |
| Vip3Ad3 | KF826720 |
| Vip3Ad4 | KF826727 |
| Vip3Ad5 | KR263164 |
| Vip3Ad6 | KU761577 |
| Vip3Ae1 | CAI43277 |
| Vip3Af1 | CAI43275 |
| Vip3Af2 | |
| Vip3Af3 | HM117634 |
| Vip3Af4 | KM276664 |
| Vip3Ag1 | |
| Vip3Ag2 | FJ556803 |
| Vip3Ag3 | HM117633 |
| Vip3Ag4 | HQ414237 |
| Vip3Ag5 | HQ542193 |
| Vip3Ag6 | JQ397328 |
| Vip3Ag7 | KF826713 |
| Vip3Ag8 | KF826714 |
| Vip3Ag9 | KF826715 |
| Vip3Ag10 | KF826716 |
| Vip3Ag11 | KF826719 |
| Vip3Ag12 | KF826721 |
| Vip3Ag13 | KF826722 |
| Vip3Ag14 | KF826725 |
| Vip3Ag15 | KF826726 |
| Vip3Ah1 | DQ832323 |
| Vip3Ah2 | AQY42675 |
| Vip3Ai1 | KC156693 |
| Vip3Aj1 | KF826717 |
| Vip3Aj2 | KF826724 |
| Vip3Ba1 | AAV70653 |
| Vip3Ba2 | HM117635 |
| Vip3Bb1 | |
| Vip3Bb2 | ABO30520 |
| Vip3Bb3 | ADI48120 |
| Vip3Bc | MF543028 |
| Vip3Ca1 | ADZ46178 |
| Vip3Ca2 | AEE98106 |
| Vip3Ca3 | HQ876489 |
| Vip3Ca4 | JN836992 |
| Vip4Aa1 | HM044666 |

[0813] In some embodiments, any of the mixtures and/or compositions comprising a PFIP and a CRIP, can have one or more of the PFIPs selected from any of the foregoing Tables 7, 8, or 9, in any combination and/or quantity.

[0814] Mixtures of the Present Invention

[0815] In some embodiments, one or more of the PFIPs, CRIPs, ICKs, and/or non-ICK peptides described herein can be combined with one or more additional chemical substances, molecules, nucleotides, polynucleotides, peptides, polypeptides, proteins, poisons, insecticides, pesticides, organic compounds, inorganic compounds, prokaryote organisms, or eukaryote organisms, and/or agents produced therefrom.

[0816] In some embodiments, one or more of the PFIPs, CRIPs, ICKs, and/or non-ICK peptides described herein can be combined with one or more additional agent, i.e., one or more chemical substances, molecules, nucleotides, polynucleotides, peptides, polypeptides, proteins, poisons, insecticides, pesticides, organic compounds, inorganic compounds, prokaryote organisms, or eukaryote organisms, and/or agents produced therefrom, wherein the additional agent is an insecticide, or agent possessing insecticidal characteristics.

[0817] For example, in some embodiments, one or more of the PFIPs, CRIPs, ICKs, and/or non-ICK peptides described herein can be combined with one or more PFIPs, CRIPs, ICKs, and/or non-ICK peptides

[0818] In some embodiments, a mixture of the present invention comprises two types of insecticidal peptides, wherein the first type of insecticidal peptide is a Pore Forming Insecticidal Protein (PFIP), and the second type of insecticidal peptide is a Cysteine Rich Insecticidal Peptide (CRIP), wherein neither the PFIP nor CRIP are part of a fusion protein.

[0819] In some embodiments, a mixture of the present invention comprises two types of insecticidal peptides, wherein the first type of insecticidal peptide is a Pore Forming Insecticidal Protein (PFIP), and the second type of insecticidal peptide is a Cysteine Rich Insecticidal Peptide (CRIP), wherein neither the PFIP nor CRIP are part of a fusion protein; wherein the CRIP is an atracotoxin (ACTX), a ctenitoxin (CNTX), an Av2 toxin, an Av3 toxin, or an Av3-Variant Polypeptide (AVP).

[0820] In some embodiments, a mixture of the present invention comprises one or more PFIPs and one or more CRIPs, wherein the CRIP is an ACTX.

[0821] In some embodiments, a mixture of the present invention comprises one or more PFIPs and one or more CRIPs, wherein the CRIP is a U-ACTX peptide, an Omega-ACTX peptides, a Kappa-ACTX peptide, or a combination thereof.

[0822] In some embodiments, a mixture of the present invention comprises one or more PFIPs and one or more CRIPs, wherein the CRIP is a U-ACTX-Hv1a, a U+2-ACTX-Hv1a, a rU-ACTX-Hv1a, a rU-ACTX-Hv1b, a rκ-ACTX-Hv1c, a ω-ACTX-Hv1a, and/or a ω-ACTX-Hv1a+2.

[0823] In some embodiments, a mixture of the present invention comprises one or more PFIPs and one or more CRIPs, wherein the CRIP is an ACTX having an amino acid sequence according the amino acid sequence set forth in SEQ ID NOs: 5-6, 24, 534-635, 650-673, 724-728, 763-773, 866-867, 874-876, 878-886, 913-925, 958-992, 1038-42, 1104-1106, 1110-1118, 1141-1157, 1159-1210, 1553-1593, or 1776-1777.

[0824] In some embodiments, a mixture of the present invention comprises one or more PFIPs and one or more CRIPs, wherein the CRIP is an ACTX having an amino acid sequence according the amino acid sequence set forth in SEQ ID NOs: 5, 6, 1776, or 1777.

[0825] In some embodiments, a mixture of the present invention comprises one or more PFIPs and one or more CRIPs, wherein the CRIP is an ACTX having an amino acid sequence according the amino acid sequence set forth in SEQ ID NO: 5.

[0826] In some embodiments, a mixture of the present invention comprises one or more PFIPs and one or more CRIPs, wherein the CRIP is a ctenitoxin (CNTX).

[0827] In some embodiments, a mixture of the present invention comprises one or more PFIPs and one or more CRIPs, wherein the CRIP is a Γ-CNTX-Pn1a.

[0828] In some embodiments, a mixture of the present invention comprises one or more PFIPs and one or more CRIPs, wherein the CRIP is a Γ-CNTX-Pn1a having an amino acid sequence according the amino acid sequence set forth in SEQ ID NO: 1778.

[0829] In some embodiments, a mixture of the present invention comprises one or more PFIPs and one or more CRIPs, wherein the CRIP is an Av2 toxin.

[0830] In some embodiments, a mixture of the present invention comprises one or more PFIPs and one or more CRIPs, wherein the CRIP is an Av2 toxin having an amino acid sequence according the amino acid sequence set forth in SEQ ID NO: 1779.

[0831] In some embodiments, a mixture of the present invention comprises one or more PFIPs and one or more CRIPs, wherein the CRIP is an Av3 toxin.

[0832] In some embodiments, a mixture of the present invention comprises one or more PFIPs and one or more CRIPs, wherein the CRIP is an Av3 toxin has an amino acid sequence according the amino acid sequence set forth in SEQ ID NO: 1780.

[0833] In some embodiments, a mixture of the present invention comprises one or more PFIPs and one or more CRIPs, wherein the CRIP is an Av3-Variant Polypeptide (AVP) has an amino acid sequence according the amino acid sequence set forth in SEQ ID NOs: 1781 or 1782.

[0834] In some embodiments, a mixture of the present invention comprises two types of insecticidal peptides, wherein the first type of insecticidal peptide is a Pore Forming Insecticidal Protein (PFIP), and the second type of insecticidal peptide is a Cysteine Rich Insecticidal Peptide (CRIP), wherein neither the PFIP nor CRIP are part of a fusion protein; wherein the ratio of PFIP to CRIP is about 10,000:1, 5,000:1, 1,000:1, 500:1, 250:1, 200:1, 100:1, 99:1, 95:5, 90:10, 85:15, 80:20, 75:25, 70:30, 65:35, 60:40, 55:45, 1:1, 45:55, 40:60, 35:65, 30:70, 25:75, 20:80, 15:85, 10:90, 5:95, 1:99, 1:100, 1:200, 1:250, 1:500, 1:1,000, 1:5,000, or 1:10,000.

[0835] In some embodiments, a mixture of the present invention comprises two types of insecticidal peptides, wherein the first type of insecticidal peptide is a Pore Forming Insecticidal Protein (PFIP), and the second type of insecticidal peptide is a Cysteine Rich Insecticidal Peptide (CRIP), wherein neither the PFIP nor CRIP are part of a fusion protein; wherein the ratio of Bti to ACTX is from about 1:1 to about 1:5000.

[0836] In some embodiments, a mixture of the present invention comprises two types of insecticidal peptides, wherein the first type of insecticidal peptide is a Pore Forming Insecticidal Protein (PFIP), and the second type of insecticidal peptide is a Cysteine Rich Insecticidal Peptide (CRIP), wherein neither the PFIP nor CRIP are part of a fusion protein; wherein the ratio of Bti to ACTX is about 1:4000.

[0837] In some embodiments, a mixture of the present invention comprises two types of insecticidal peptides, wherein the first type of insecticidal peptide is a Pore Forming Insecticidal Protein (PFIP), and the second type of insecticidal peptide is a Cysteine Rich Insecticidal Peptide (CRIP), wherein neither the PFIP nor CRIP are part of a fusion protein; wherein the ratio of Btk to ACTX is from about 1:1 to about 1:10.

[0838] In some embodiments, a mixture of the present invention comprises two types of insecticidal peptides, wherein the first type of insecticidal peptide is a Pore Forming Insecticidal Protein (PFIP), and the second type of insecticidal peptide is a Cysteine Rich Insecticidal Peptide (CRIP), wherein neither the PFIP nor CRIP are part of a fusion protein; wherein the ratio of Btk to ACTX is about 1:9.2

[0839] In some embodiments, a mixture of the present invention comprises two types of insecticidal peptides, wherein the first type of insecticidal peptide is a Pore Forming Insecticidal Protein (PFIP), and the second type of insecticidal peptide is a Cysteine Rich Insecticidal Peptide (CRIP), wherein neither the PFIP nor CRIP are part of a fusion protein; wherein the ratio of Btk to Av3 is from about 1:1 to about 1:1.5.

[0840] In some embodiments, a mixture of the present invention comprises two types of insecticidal peptides, wherein the first type of insecticidal peptide is a Pore Forming Insecticidal Protein (PFIP), and the second type of insecticidal peptide is a Cysteine Rich Insecticidal Peptide (CRIP), wherein neither the PFIP nor CRIP are part of a fusion protein; wherein the ratio of Btk to Av3 is from about 1:1 to about 1:1.5.

[0841] In some embodiments, a mixture of the present invention comprises two types of insecticidal peptides, wherein the first type of insecticidal peptide is a Pore Forming Insecticidal Protein (PFIP), and the second type of insecticidal peptide is a Cysteine Rich Insecticidal Peptide (CRIP), wherein neither the PFIP nor CRIP are part of a fusion protein; wherein the ratio of Btk to AVP is about 1:1.375.

[0842] In some embodiments, a mixture of the present invention comprises two types of insecticidal peptides, wherein the first type of insecticidal peptide is a Pore Forming Insecticidal Protein (PFIP), and the second type of insecticidal peptide is a Cysteine Rich Insecticidal Peptide (CRIP), wherein neither the PFIP nor CRIP are part of a fusion protein; wherein the ratio of Btt to ACTX is from about 1:1 to about 1:10.

[0843] In some embodiments, a mixture of the present invention comprises two types of insecticidal peptides, wherein the first type of insecticidal peptide is a Pore Forming Insecticidal Protein (PFIP), and the second type of insecticidal peptide is a Cysteine Rich Insecticidal Peptide (CRIP), wherein neither the PFIP nor CRIP are part of a fusion protein; wherein the ratio of Btt to ACTX is about 1:8.75.

[0844] In some embodiments, a mixture of the present invention comprises two types of insecticidal peptides, wherein the first type of insecticidal peptide is a Pore Forming Insecticidal Protein (PFIP), and the second type of insecticidal peptide is a Cysteine Rich Insecticidal Peptide (CRIP), wherein neither the PFIP nor CRIP are part of a fusion protein; wherein the first type of insecticidal peptide is a Bacillus thuringiensis ssp. tenebrionis (Btt) toxin; and wherein the second type of insecticidal peptide is an ACTX peptide. In yet other embodiments, the Btt toxin is a Bacillus thuringiensis ssp. tenebrionis strain NB-176 Btt toxin; and the ACTX peptide is a U+2-ACTX-Hv1a toxin (SEQ ID NO: 5).

[0845] In some embodiments, a mixture of the present invention comprises two types of insecticidal peptides, wherein the first type of insecticidal peptide is a Pore Forming Insecticidal Protein (PFIP), and the second type of insecticidal peptide is a Cysteine Rich Insecticidal Peptide (CRIP), wherein neither the PFIP nor CRIP are part of a fusion protein; wherein the first type of insecticidal peptide is a Bacillus thuringiensis ssp. kurstaki (Btk) toxin; and wherein the second type of insecticidal peptide is an ACTX peptide. In yet other embodiments, wherein the Btk toxin is a Bacillus thuringiensis ssp. kurstaki strain EVB-113-19 Btk toxin; and the ACTX peptide is a U+2-ACTX-Hv1a toxin (SEQ ID NO: 5).

[0846] In some embodiments, a mixture of the present invention comprises two types of insecticidal peptides, wherein the first type of insecticidal peptide is a Pore Forming Insecticidal Protein (PFIP), and the second type of insecticidal peptide is a Cysteine Rich Insecticidal Peptide (CRIP), wherein neither the PFIP nor CRIP are part of a fusion protein; wherein the first type of insecticidal peptide is a Bacillus thuringiensis ssp. kurstaki (Btk toxin); and wherein the second type of insecticidal peptide is a CNTX. In yet other embodiments, the Btk toxin is a Bacillus thuringiensis ssp. kurstaki strain EVB-113-19 Btk toxin; and the CNTX is a Γ-CNTX-Pn1a toxin (SEQ ID NO: 1778).

[0847] In some embodiments, a mixture of the present invention comprises two types of insecticidal peptides, wherein the first type of insecticidal peptide is a Pore Forming Insecticidal Protein (PFIP), and the second type of insecticidal peptide is a Cysteine Rich Insecticidal Peptide (CRIP), wherein neither the PFIP nor CRIP are part of a fusion protein; wherein the first type of insecticidal peptide is a Bacillus thuringiensis ssp. kurstaki (Btk) toxin; and wherein the second type of insecticidal peptide is a Av3-Variant Polypeptide (AVP). In yet other embodiments, the Btk toxin is a Bacillus thuringiensis ssp. kurstaki strain EVB-113-19 Btk toxin; and the AVP is an Av3-Variant Polypeptide (AVP) having an amino acid sequence as set forth in SEQ ID NO: 1782.

[0848] In some embodiments, a mixture of the present invention comprises two types of insecticidal peptides, wherein the first type of insecticidal peptide is a Pore Forming Insecticidal Protein (PFIP), and the second type of insecticidal peptide is a Cysteine Rich Insecticidal Peptide (CRIP), wherein neither the PFIP nor CRIP are part of a fusion protein; wherein the first type of insecticidal peptide is a Bacillus thuringiensis ssp. israelensis (Bti) toxin; and wherein the second type of insecticidal peptide is an ACTX peptide. In yet other embodiments, the Bti toxin is a Bacillus thuringiensis ssp. israelensis Strain BMP 144 Bti toxin; and the ACTX peptide is a U+2-ACTX-Hv1a toxin (SEQ ID NO: 5).

[0849] In some embodiments, a mixture of the present invention comprises two types of insecticidal peptides, wherein the first type of insecticidal peptide is a Pore Forming Insecticidal Protein (PFIP), and the second type of insecticidal peptide is a Cysteine Rich Insecticidal Peptide (CRIP), wherein neither the PFIP nor CRIP are part of a fusion protein; and wherein the CRIP is a snake venom or toxin therefrom.

[0850] In some embodiments, a mixture of the present invention comprises two types of insecticidal peptides, wherein the first type of insecticidal peptide is a Pore Forming Insecticidal Protein (PFIP), and the second type of insecticidal peptide is a Cysteine Rich Insecticidal Peptide (CRIP), wherein neither the PFIP nor CRIP are part of a fusion protein; and wherein the CRIP is a snake venom or toxin therefrom.

[0851] In some embodiments, a mixture of the present invention comprises two types of insecticidal peptides, wherein the first type of insecticidal peptide is a Pore Forming Insecticidal Protein (PFIP), and the second type of insecticidal peptide is a Cysteine Rich Insecticidal Peptide (CRIP), wherein neither the PFIP nor CRIP are part of a fusion protein; and wherein the mixture further comprises one or more snake venoms or toxins therefrom.

[0852] In some embodiments, one or more of the PFIPs, CRIPs, ICKs, and/or non-ICK peptides described herein, can be combined with one or more snake venoms or toxins therefrom.

[0853] In some embodiments, a mixture of the present invention can comprise two separate and/or distinct types of insecticidal peptides (i.e., insecticidal peptides that are fused together, e.g., as in a fusion protein), wherein the first type of insecticidal peptide is a Pore Forming Insecticidal Protein (PFIP), and the second type of insecticidal peptide is a Cysteine Rich Insecticidal Peptide (CRIP).

[0854] In some embodiments, a mixture of the present invention can comprise two separate and/or distinct types of insecticidal peptides that are not a fusion protein (i.e., insecticidal peptides that are not fused together, e.g., as in a mixture or combination comprising two separate proteins), wherein the first type of insecticidal peptide is a Pore Forming Insecticidal Protein (PFIP), and the second type of insecticidal peptide is a Cysteine Rich Insecticidal Peptide (CRIP).

[0855] In some embodiments, a mixture of the present invention can comprise a first insecticidal peptide that is a PFIP, and a second insecticidal peptide that is a CRIP.

[0856] In some embodiments, a mixture of the present invention can comprise a first insecticidal peptide that is a PFIP, e.g., a Bacillus thuringiensis toxin (Bt), and a second insecticidal peptide that is an atracotoxin (ACTX), a ctenitoxin (CNTX), an Av2 toxin, an Av3 toxin, or an Av3-Variant Polypeptide (AVP).

[0857] In the present disclosure, CRIPs do not include a U1-agatoxin-Ta1b polypeptide, or variants thereof (e.g., a TVP).

[0858] In some embodiments, a mixture of the present invention can comprise one or more of the following toxins: Bacillus thuringiensis var. israelensis toxin (Bti), Bacillus thuringiensis var. kurstaki toxin (Btk), Bacillus thuringiensis var. tenebrionis toxin (Btt), or a combination thereof.

[0859] In some embodiments, a mixture of the present invention can comprise a Bti toxin that is a Becker Bti™, a Btt toxin that is NOVODOR® FC, a Btk toxin that is a BioProtec Plus™, or a combination thereof.

[0860] In some embodiments, a mixture of the present invention can comprise one or more PFIPs and one or more CRIPs, wherein the PFIP is one or more crystal (Cry) toxins, cytolytic (Cyt) toxins, vegetative insecticidal proteins (Vips), secreted insecticidal protein (Sips), Bin-like toxins, or a combination thereof.

[0861] In some embodiments, a mixture of the present invention can comprise one or more PFIPs and one or more CRIPs, wherein the PFIP is one or more Cry toxins, Cyt toxins, Vips, or a combination thereof.

[0862] In some embodiments, a mixture of the present invention can comprise one or more PFIPs and one or more CRIPs, wherein the PFIP is one or more Cry toxin and/or combinations of Cry toxins. For example, in some embodiments, the Cry toxin can be one or more of a Cry1Aa1, Cry1Aa2, Cry1Aa3, Cry1Aa4, Cry1Aa5, Cry1Aa6, Cry1Aa7, Cry1Aa8, Cry1Aa9, Cry1Aa10, Cry1Aa11, Cry1Aa12, Cry1Aa13, Cry1Aa14, Cry1Aa15, Cry1Aa16, Cry1Aa17, Cry1Aa18, Cry1Aa19, Cry1Aa20, Cry1Aa21, Cry1Aa22, Cry1Aa23, Cry1Aa24, Cry1Aa25, Cry1Ab1, Cry1Ab2, Cry1Ab3, Cry1Ab4, Cry1Ab5, Cry1Ab6, Cry1Ab7, Cry1Ab8, Cry1Ab9, Cry1Ab10, Cry1Ab11, Cry1Ab12, Cry1Ab13, Cry1Ab14, Cry1Ab15, Cry1Ab16, Cry1Ab17, Cry1Ab18, Cry1Ab19, Cry1Ab20, Cry1Ab21, Cry1Ab22, Cry1Ab23, Cry1Ab24, Cry1Ab25, Cry1Ab26, Cry1Ab27, Cry1Ab28, Cry1Ab29, Cry1Ab30, Cry1Ab31, Cry1Ab32, Cry1Ab33, Cry1Ab34, Cry1Ab35, Cry1Ab36, Cry1Ab-like, Cry1Ab-like, Cry1Ab-like, Cry1Ab-like, Cry1Ac1, Cry1Ac2, Cry1Ac3, Cry1Ac4, Cry1Ac5, Cry1Ac6, Cry1Ac7, Cry1Ac8, Cry1Ac9, Cry1Ac10, Cry1Ac11, Cry1Ac12, Cry1Ac13, Cry1Ac14, Cry1Ac15, Cry1Ac16, Cry1Ac17, Cry1Ac18, Cry1Ac19, Cry1Ac20, Cry1Ac21, Cry1Ac22, Cry1Ac23, Cry1Ac24, Cry1Ac25, Cry1Ac26, Cry1Ac27, Cry1Ac28, Cry1Ac29, Cry1Ac30, Cry1Ac31, Cry1Ac32, Cry1Ac33, Cry1Ac34, Cry1Ac35, Cry1Ac36, Cry1Ac37, Cry1Ac38, Cry1Ac39, Cry1Ad1, Cry1Ad2, Cry1Ae1, Cry1Af1, Cry1Ag1, Cry1Ah1, Cry1Ah2, Cry1Ah3, Cry1Ai1, Cry1Ai2, Cry1Aj1, Cry1A-like, Cry1Ba1, Cry1Ba2, Cry1Ba3, Cry1Ba4, Cry1Ba5, Cry1Ba6, Cry1Ba7, Cry1Ba8, Cry1Bb1, Cry1Bb2, Cry1Bb3, Cry1Bc1, Cry1Bd1, Cry1Bd2, Cry1Bd3, Cry1Be1, Cry1Be2, Cry1Be3, Cry1Be4, Cry1Be5, Cry1Bf1, Cry1Bf2, Cry1Bg1, Cry1Bh1, Cry1Bi1, Cry1Bj1, Cry1Ca1, Cry1Ca2, Cry1Ca3, Cry1Ca4, Cry1Ca5, Cry1Ca6, Cry1Ca7, Cry1Ca8, Cry1Ca9, Cry1Ca10, Cry1Ca11, Cry1Ca12, Cry1Ca13, Cry1Ca14, Cry1Ca15, Cry1Cb1, Cry1Cb2, Cry1Cb3, Cry1Cb-like, Cry1Da1, Cry1Da2, Cry1Da3, Cry1Da4, Cry1Da5, Cry1Db1, Cry1Db2, Cry1Dc1, Cry1Dd1, Cry1Ea1, Cry1Ea2, Cry1Ea3, Cry1Ea4, Cry1Ea5, Cry1Ea6, Cry1Ea7, Cry1Ea8, Cry1Ea9, Cry1Ea10, Cry1Ea11, Cry1Ea12, Cry1Eb1, Cry1Fa1, Cry1Fa2, Cry1Fa3, Cry1Fa4, Cry1Fb1, Cry1Fb2, Cry1Fb3, Cry1Fb4, Cry1Fb5, Cry1Fb6, Cry1Fb7, Cry1Ga1, Cry1Ga2, Cry1Gb1, Cry1Gb2, Cry1Gc1, Cry1Ha1, Cry1Hb1, Cry1Hb2, Cry1Hc1, Cry1H-like, Cry1Ia1, Cry1Ia2, Cry1Ia3, Cry1Ia4, Cry1Ia5, Cry1Ia6, Cry1Ia7, Cry1Ia8, Cry1Ia9, Cry1Ia10, Cry1Ia11, Cry1Ia12, Cry1Ia13, Cry1Ia14, Cry1Ia15, Cry1Ia16, Cry1Ia17, Cry1Ia18, Cry1Ia19, Cry1Ia20, Cry1Ia21, Cry1Ia22, Cry1Ia23, Cry1Ia24, Cry1Ia25, Cry1Ia26, Cry1Ia27, Cry1Ia28, Cry1Ia29, Cry1Ia30, Cry1Ia31, Cry1Ia32, Cry1Ia33, Cry1Ia34, Cry1Ia35, Cry1Ia36, Cry1Ia37, Cry1Ia38, Cry1Ia39, Cry1Ia40, Cry1Ib1, Cry1Ib2, Cry1Ib3, Cry1Ib4, Cry1Ib5, Cry1Ib6, Cry1Ib7, Cry1Ib8, Cry1Ib9, Cry1Ib10, Cry1Ib11, Cry1Ic1, Cry1Ic2, Cry1Id1, Cry1Id2, Cry1Id3, Cry1Ie1, Cry1Ie2, Cry1Ie3, Cry1Ie4, Cry1Ie5, Cry1If1, Cry1Ig1, Cry1I-like, Cry1I-like, Cry1Ja1, Cry1Ja2, Cry1Ja3, Cry1Jb1, Cry1Jc1, Cry1Jc2, Cry1Jd1, Cry1Ka1, Cry1Ka2, Cry1La1, Cry1La2, Cry1La3, Cry1Ma1, Cry1Ma2, Cry1Na1, Cry1Na2, Cry1Na3, Cry1Nb1, Cry1-like, Cry2Aa1, Cry2Aa2, Cry2Aa3, Cry2Aa4, Cry2Aa5, Cry2Aa6, Cry2Aa7, Cry2Aa8, Cry2Aa9, Cry2Aa10, Cry2Aa11, Cry2Aa12, Cry2Aa13, Cry2Aa14, Cry2Aa15, Cry2Aa16, Cry2Aa17, Cry2Aa18, Cry2Aa19, Cry2Aa20, Cry2Aa21, Cry2Aa22, Cry2Aa23, Cry2Aa23, Cry2Aa25, Cry2Ab1, Cry2Ab2, Cry2Ab3, Cry2Ab4, Cry2Ab5, Cry2Ab6, Cry2Ab7, Cry2Ab8, Cry2Ab9, Cry2Ab10, Cry2Ab11, Cry2Ab12, Cry2Ab13, Cry2Ab14, Cry2Ab15, Cry2Ab16, Cry2Ab17, Cry2Ab18, Cry2Ab19, Cry2Ab20, Cry2Ab21, Cry2Ab22, Cry2Ab23, Cry2Ab24, Cry2Ab25, Cry2Ab26, Cry2Ab27, Cry2Ab28, Cry2Ab29, Cry2Ab30, Cry2Ab31, Cry2Ab32, Cry2Ab33, Cry2Ab34, Cry2Ab35, Cry2Ab36, Cry2Ac1, Cry2Ac2, Cry2Ac3, Cry2Ac4, Cry2Ac5, Cry2Ac6, Cry2Ac7, Cry2Ac8, Cry2Ac9, Cry2Ac10, Cry2Ac11, Cry2Ac12, Cry2Ad1, Cry2Ad2, Cry2Ad3, Cry2Ad4, Cry2Ad5, Cry2Ae1, Cry2Af1, Cry2Af2, Cry2Ag1, Cry2Ah1, Cry2Ah2, Cry2Ah3, Cry2Ah4, Cry2Ah5, Cry2Ah6, Cry2Ai1, Cry2Aj1, Cry2Ak1, Cry2Al1, Cry2Ba1, Cry2Ba2, Cry3Aa1, Cry3Aa2, Cry3Aa3, Cry3Aa4, Cry3Aa5, Cry3Aa6, Cry3Aa7, Cry3Aa8, Cry3Aa9, Cry3Aa10, Cry3Aa11, Cry3Aa12, Cry3Ba1, Cry3Ba2, Cry3Ba3, Cry3Bb1, Cry3Bb2, Cry3Bb3, Cry3Ca1, Cry4Aa1, Cry4Aa2, Cry4Aa3, Cry4Aa4, Cry4A-like, Cry4Ba1, Cry4Ba2, Cry4Ba3, Cry4Ba4, Cry4Ba5, Cry4Ba-like, Cry4Ca1, Cry4Ca2, Cry4Cb1, Cry4Cb2, Cry4Cb3, Cry4Cc1, Cry5Aa1, Cry5Ab1, Cry5Ac1, Cry5Ad1, Cry5Ba1, Cry5Ba2, Cry5Ba3, Cry5Ca1, Cry5Ca2, Cry5Da1, Cry5Da2, Cry5Ea1, Cry5Ea2, Cry6Aa1, Cry6Aa2, Cry6Aa3, Cry6Ba1, Cry7Aa1, Cry7Aa2, Cry7Ab1, Cry7Ab2, Cry7Ab3, Cry7Ab4, Cry7Ab5, Cry7Ab6, Cry7Ab7, Cry7Ab8, Cry7Ab9, Cry7Ac1, Cry7Ba1, Cry7Bb1, Cry7Ca1, Cry7Cb1, Cry7Da1, Cry7Da2, Cry7Da3, Cry7Ea1, Cry7Ea2, Cry7Ea3, Cry7Fa1, Cry7Fa2, Cry7Fb1, Cry7Fb2, Cry7Fb3, Cry7Ga1, Cry7Ga2, Cry7Gb1, Cry7Gc1, Cry7Gd1, Cry7Ha1, Cry7Ia1, Cry7Ja1, Cry7Ka1, Cry7Kb1, Cry7La1, Cry8Aa1, Cry8Ab1, Cry8Ac1, Cry8Ad1, Cry8Ba1, Cry8Bb1, Cry8Bc1, Cry8Ca1, Cry8Ca2, Cry8Ca3, Cry8Ca4, Cry8Ca5, Cry8Da1, Cry8Da2, Cry8Da3, Cry8Db1, Cry8Ea1, Cry8Ea2, Cry8Ea3, Cry8Ea4, Cry8Ea5, Cry8Ea6, Cry8Fa1, Cry8Fa2, Cry8Fa3, Cry8Fa4, Cry8Ga1, Cry8Ga2, Cry8Ga3, Cry8Ha1, Cry8Hb1, Cry8Ia1, Cry8Ia2, Cry8Ia3, Cry8Ia4, Cry8Ib1, Cry8Ib2, Cry8Ib3, Cry8Ja1, Cry8Ka1, Cry8Ka2, Cry8Ka3, Cry8Kb1, Cry8Kb2, Cry8Kb3, Cry8La1, Cry8Ma1, Cry8Ma2, Cry8Ma3, Cry8Na1, Cry8Pa1, Cry8Pa2, Cry8Pa3, Cry8Qa1, Cry8Qa2, Cry8Ra1, Cry8Sa1, Cry8Ta1, Cry8-like, Cry8-like, Cry9Aa1, Cry9Aa2, Cry9Aa3, Cry9Aa4, Cry9Aa5, Cry9Aa, like, Cry9Ba1, Cry9Ba2, Cry9Bb1, Cry9Ca1, Cry9Ca2, Cry9Cb1, Cry9Da1, Cry9Da2, Cry9Da3, Cry9Da4, Cry9Db1, Cry9Dc1, Cry9Ea1, Cry9Ea2, Cry9Ea3, Cry9Ea4, Cry9Ea5, Cry9Ea6, Cry9Ea7, Cry9Ea8, Cry9Ea9, Cry9Ea10, Cry9Ea11, Cry9Eb1, Cry9Eb2, Cry9Eb3, Cry9Ec1, Cry9Ed1, Cry9Ee1, Cry9Ee2, Cry9Fa1, Cry9Ga1, Cry9-like, Cry10Aa1, Cry10Aa2, Cry10Aa3, Cry10Aa4, Cry10A-like, Cry11Aa1, Cry11Aa2, Cry11Aa3, Cry11Aa4, Cry11Aa5, Cry11Aa-like, Cry11Ba1, Cry11Bb1, Cry11Bb2, Cry12Aa1, Cry13Aa1, Cry13Aa2, Cry14Aa1, Cry14Ab1, Cry15Aa1, Cry16Aa1, Cry17Aa1, Cry18Aa1, Cry18Ba1, Cry18Ca1, Cry19Aa1, Cry19Ba1, Cry19Ca1, Cry20Aa1, Cry20Ba1, Cry20Ba2, Cry20-like, Cry21Aa1, Cry21Aa2, Cry21Aa3, Cry21Ba1, Cry21Ca1, Cry21Ca2, Cry21Da1, Cry21Ea1, Cry21Fa1, Cry21Ga1, Cry21Ha1, Cry22Aa1, Cry22Aa2, Cry22Aa3, Cry22Ab1, Cry22Ab2, Cry22Ba1, Cry22Bb1, Cry23Aa1, Cry24Aa1, Cry24Ba1, Cry24Ca1, Cry24Da1, Cry25Aa1, Cry26Aa1, Cry27Aa1, Cry28Aa1, Cry28Aa2, Cry29Aa1, Cry29Ba1, Cry30Aa1, Cry30Ba1, Cry30Ca1, Cry30Ca2, Cry30Da1, Cry30Db1, Cry30Ea1, Cry30Ea2, Cry30Ea3, Cry30Ea4, Cry30Fa1, Cry30Ga1, Cry30Ga2, Cry31Aa1, Cry31Aa2, Cry31Aa3, Cry31Aa4, Cry31Aa5, Cry31Aa6, Cry31Ab1, Cry31Ab2, Cry31Ac1, Cry31Ac2, Cry31Ad1, Cry31Ad2, Cry32Aa1, Cry32Aa2, Cry32Ab1, Cry32Ba1, Cry32Ca1, Cry32Cb1, Cry32Da1, Cry32Ea1, Cry32Ea2, Cry32Eb1, Cry32Fa1, Cry32Ga1, Cry32Ha1, Cry32Hb1, Cry32Ia1, Cry32Ja1, Cry32Ka1, Cry32La1, Cry32Ma1, Cry32Mb1, Cry32Na1, Cry32Oa1, Cry32Pa1, Cry32Qa1, Cry32Ra1, Cry32Sa1, Cry32Ta1, Cry32Ua1, Cry32Va1, Cry32Wa1, Cry32Wa2, Cry32Xa1, Cry32Ya1, Cry33Aa1, Cry34Aa1, Cry34Aa2, Cry34Aa3, Cry34Aa4, Cry34Ab1, Cry34Ac1, Cry34Ac2, Cry34Ac3, Cry34Ba1, Cry34Ba2, Cry34Ba3, Cry35Aa1, Cry35Aa2, Cry35Aa3, Cry35Aa4, Cry35Ab1, Cry35Ab2, Cry35Ab3, Cry35Ac1, Cry35Ba1, Cry35Ba2, Cry35Ba3, Cry36Aa1, Cry37Aa1, Cry38Aa1, Cry39Aa1, Cry40Aa1, Cry40Ba1, Cry40Ca1, Cry40Da1, Cry41Aa1, Cry41Ab1, Cry41Ba1, Cry41Ba2, Cry41Ca1, Cry42Aa1, Cry43Aa1, Cry43Aa2, Cry43Ba1, Cry43Ca1, Cry43Cb1, Cry43Cc1, Cry43-like, Cry44Aa1, Cry45Aa1, Cry45Ba1, Cry46Aa1, Cry46Aa2, Cry46Ab1, Cry47Aa1, Cry48Aa1, Cry48Aa2, Cry48Aa3, Cry48Ab1, Cry48Ab2, Cry49Aa1, Cry49Aa2, Cry49Aa3, Cry49Aa4, Cry49Ab1, Cry50Aa1, Cry50Ba1, Cry50Ba2, Cry51Aa1, Cry51Aa2, Cry52Aa1, Cry52Ba1, Cry52Ca1, Cry53Aa1, Cry53Ab1, Cry54Aa1, Cry54Aa2, Cry54Ab1, Cry54Ba1, Cry54Ba2, Cry55Aa1, Cry55Aa2, Cry55Aa3, Cry56Aa1, Cry56Aa2, Cry56Aa3, Cry56Aa4, Cry57Aa1, Cry57Ab1, Cry58Aa1, Cry59Ba1, Cry59Aa1, Cry60Aa1, Cry60Aa2, Cry60Aa3, Cry60Ba1, Cry60Ba2, Cry60Ba3, Cry61Aa1, Cry61Aa2, Cry61Aa3, Cry62Aa1, Cry63Aa1, Cry64Aa1, Cry64Ba1, Cry64Ca1, Cry65Aa1, Cry65Aa2, Cry66Aa1, Cry66Aa2, Cry67Aa1, Cry67Aa2, Cry68Aa1, Cry69Aa1, Cry69Aa2, Cry69Ab1, Cry70Aa1, Cry70Ba1, Cry70Bb1, Cry71Aa1, Cry72Aa1, Cry72Aa2, Cry73Aa1, Cry74Aa, Cry75Aa1, Cry75Aa2, Cry75Aa3, Cry76Aa1, Cry77Aa1, Cry78Aa1, and/or a combination thereof.

[0863] In some embodiments, a mixture of the present invention can comprise one or more PFIPs and one or more CRIPs, wherein the PFIP is one or more Cyt toxins. For example, in some embodiments, one or more Cyt toxins or combinations of Cyt toxins can be a Cyt1Aa1, Cyt1Aa2, Cyt1Aa3, Cyt1Aa4, Cyt1Aa5, Cyt1Aa6, Cyt1Aa7, Cyt1Aa8, Cyt1Aa-like, Cyt1Ab1, Cyt1Ba1, Cyt1Ca1, Cyt1Da1, Cyt1Da2, Cyt2Aa1, Cyt2Aa2, Cyt2Aa3, Cyt2Aa4, Cyt2Ba1, Cyt2Ba2, Cyt2Ba3, Cyt2Ba4, Cyt2Ba5, Cyt2Ba6, Cyt2Ba7, Cyt2Ba8, Cyt2Ba9, Cyt2Ba10, Cyt2Ba11, Cyt2Ba12, Cyt2Ba13, Cyt2Ba14, Cyt2Ba15, Cyt2Ba16, Cyt2Ba-like, Cyt2Bb1, Cyt2Bc1, Cyt2B-like, Cyt2Ca1, Cyt3Aa1 and/or a combination thereof.

[0864] In some embodiments, a mixture of the present invention can comprise a PFIP that is one or more Cry toxins and/or one or more Cyt toxins. For example, in some embodiments, the one or more Cry toxins and/or one or more Cyt toxins having an amino acid sequence according to SEQ ID NOs: 1366-1446.

[0865] In some embodiments, a mixture of the present invention can comprise one or more PFIPs and one or more CRIPs, wherein the PFIP is one or more Vips, or a combination of Vips. For example, in some embodiments, the one or more Vips can be a Vip1Aa1, Vip1Aa2, Vip1Aa3, Vip1Ab1, Vip1Ac1, Vip1Ad1, Vip1Ba1, Vip1Ba2, Vip1Bb1, Vip1Bb2, Vip1Bb3, Vip1Bc1, Vip1Ca1, Vip1Ca2, Vip1Da1, Vip2Aa1, Vip2Aa2, Vip2Aa3, Vip2Ab1, Vip2Ac1, Vip2Ac2, Vip2Ad1, Vip2Ae1, Vip2Ae2, Vip2Ae3, Vip2Af1, Vip2Af2, Vip2Ag1, Vip2Ag2, Vip2Ba1, Vip2Ba2, Vip2Bb1, Vip2Bb2, Vip2Bb3, Vip2Bb4, Vip3Aa1, Vip3Aa2, Vip3Aa3, Vip3Aa4, Vip3Aa5, Vip3Aa6, Vip3Aa7, Vip3Aa8, Vip3Aa9, Vip3Aa10, Vip3Aa1, Vip3Aa12, Vip3Aa13, Vip3Aa14, Vip3Aa15, Vip3Aa16, Vip3Aa17, Vip3Aa18, Vip3Aa19.0, Vip3Aa19, Vip3Aa20, Vip3Aa21, Vip3Aa22, Vip3Aa23, Vip3Aa24, Vip3Aa25, Vip3Aa26, Vip3Aa27, Vip3Aa28, Vip3Aa29, Vip3Aa30, Vip3Aa31, Vip3Aa32, Vip3Aa33, Vip3Aa34, Vip3Aa35, Vip3Aa36, Vip3Aa37, Vip3Aa38, Vip3Aa39, Vip3Aa40, Vip3Aa41, Vip3Aa42, Vip3Aa43, Vip3Aa44, Vip3Aa45, Vip3Aa46, Vip3Aa47, Vip3Aa48, Vip3Aa49, Vip3Aa50, Vip3Aa51, Vip3Aa52, Vip3Aa53, Vip3Aa54, Vip3Aa55, Vip3Aa56, Vip3Aa57, Vip3Aa58, Vip3Aa59, Vip3Aa60, Vip3Aa61, Vip3Aa62, Vip3Aa63, Vip3Aa64, Vip3Aa65, Vip3Aa66, Vip3Ab1, Vip3Ab2, Vip3Ac1, Vip3Ad1, Vip3Ad2, Vip3Ad3, Vip3Ad4, Vip3Ad5, Vip3Ad6, Vip3Ae1, Vip3Af1, Vip3Af2, Vip3Af3, Vip3Af4, Vip3Ag1, Vip3Ag2, Vip3Ag3, Vip3Ag4, Vip3Ag5, Vip3Ag6, Vip3Ag7, Vip3Ag8, Vip3Ag9, Vip3Ag10, Vip3Ag11, Vip3Ag12, Vip3Ag13, Vip3Ag14, Vip3Ag15, Vip3Ah1, Vip3Ah2, Vip3Ai1, Vip3Aj1, Vip3Aj2, Vip3Ba1, Vip3Ba2, Vip3Bb1, Vip3Bb2, Vip3Bb3, Vip3Bc, Vip3Ca1, Vip3Ca2, Vip3Ca3, Vip3Ca4, Vip4Aa1, and/or a combination thereof.

[0866] In some embodiments, a mixture of the present invention can comprise a PFIP that is a Vip, or a combination of Vips, e.g., a Vip toxin that has an amino acid sequence according to the amino acid sequence set forth in SEQ ID NOs: 1447-1552.

[0867] In some embodiments, a mixture of the present invention can comprise one or more CRIPs that are one or more peptides derived from a spider, a scorpion, a cone shell and/or a sea anemone.

[0868] In some embodiments, a mixture of the present invention can comprise one or more PFIPs and one or more CRIPs, wherein the one or more CRIPs is one or more peptides derived from an arachnid.

[0869] In some embodiments, a mixture of the present invention can comprise one or more PFIPs and one or more CRIPs, wherein the one or more CRIPs is one or more peptides derived from Agelenopsis aperta, e.g., a peptide having an amino acid sequence according to the amino acid sequence set forth in SEQ ID NOs: 636-641, 761, 1121-25, 1138-40.

[0870] In some embodiments, a mixture of the present invention can comprise one or more PFIPs and one or more CRIPs, wherein the one or more CRIPs is one or more peptides derived from Agelena orientalis, e.g., a peptide having an amino acid sequence according to the amino acid sequence set forth in SEQ ID NOs: 739-759, 805-806, 928-929, 995, and 1070.

[0871] In some embodiments, a mixture of the present invention can comprise one or more PFIPs and one or more CRIPs, wherein the one or more CRIPs is one or more peptides derived from Allagelena opulenta, e.g., a peptide having an amino acid sequence according to the amino acid sequence set forth in SEQ ID NOs: 1046, and 1071.

[0872] In some embodiments, a mixture of the present invention can comprise one or more PFIPs and one or more CRIPs, wherein the one or more CRIPs is one or more peptides derived from Ancylometes sp., e.g., a peptide having an amino acid sequence according to the amino acid sequence set forth in SEQ ID NO: 1096.

[0873] In some embodiments, a mixture of the present invention can comprise one or more PFIPs and one or more CRIPs, wherein the one or more CRIPs is one or more peptides derived from Androctonus australis, e.g., a peptide having an amino acid sequence according to the amino acid sequence set forth in SEQ ID NOs: 644-646, 692, 1271, 1337, and 1767.

[0874] In some embodiments, a mixture of the present invention can comprise one or more PFIPs and one or more CRIPs, wherein the one or more CRIPs is one or more peptides derived from Androctonus mauretanicus, e.g., a peptide having an amino acid sequence according to the amino acid sequence set forth in SEQ ID NOs: 1272, 1295, 1306, and 1333.

[0875] In some embodiments, a mixture of the present invention can comprise one or more PFIPs and one or more CRIPs, wherein the one or more CRIPs is one or more peptides derived from Anuroctonus phaiodactylus, e.g., a peptide having an amino acid sequence according to the amino acid sequence set forth in SEQ ID NOs: 1312, and 1338.

[0876] In some embodiments, a mixture of the present invention can comprise one or more PFIPs and one or more CRIPs, wherein the one or more CRIPs is one or more peptides derived from Aphonopelma sp, e.g., a peptide having an amino acid sequence according to the amino acid sequence set forth in SEQ ID NOs: 777, 792, 957, and 1214-16.

[0877] In some embodiments, a mixture of the present invention can comprise one or more PFIPs and one or more CRIPs, wherein the one or more CRIPs is one or more peptides derived from Apomastus schleringi, e.g., a peptide having an amino acid sequence according to the amino acid sequence set forth in SEQ ID NOs: 851, 1075, 1084, 1762, and 1768.

[0878] In some embodiments, a mixture of the present invention can comprise one or more PFIPs and one or more CRIPs, wherein the one or more CRIPs is one or more peptides derived from Atrax formidabilis, e.g., a peptide having an amino acid sequence according to the amino acid sequence set forth in SEQ ID NOs: 629-631.

[0879] In some embodiments, a mixture of the present invention can comprise one or more PFIPs and one or more CRIPs, wherein the one or more CRIPs is one or more peptides derived from Atrax sp. Illawarra, e.g., a peptide having an amino acid sequence according to the amino acid sequence set forth in SEQ ID NOs: 1156-57.

[0880] In some embodiments, a mixture of the present invention can comprise one or more PFIPs and one or more CRIPs, wherein the one or more CRIPs is one or more peptides derived from Atrax infensus, e.g., a peptide having an amino acid sequence according to the amino acid sequence set forth in SEQ ID NOs: 632-633.

[0881] In some embodiments, a mixture of the present invention can comprise one or more PFIPs and one or more CRIPs, wherein the one or more CRIPs is one or more peptides derived from Atrax robustus, e.g., a peptide having an amino acid sequence according to the amino acid sequence set forth in SEQ ID NOs: 534, 536, 542, 550, 551, 560, 561, 592-603, 624-627, 650-652, 670-671, 724-728, 874-876, 958, 960, 967, 970, 975, 984-985, 1104, 1141-55, 1568-69, and 1589-90.

[0882] In some embodiments, a mixture of the present invention can comprise one or more PFIPs and one or more CRIPs, wherein the one or more CRIPs is one or more peptides derived from Bothus martensii Karsch, e.g., a peptide having an amino acid sequence according to the amino acid sequence set forth in SEQ ID NOs: 681-684, and 695.

[0883] In some embodiments, a mixture of the present invention can comprise one or more PFIPs and one or more CRIPs, wherein the one or more CRIPs is one or more peptides derived from Bothus occitanus tunetanus, e.g., a peptide having an amino acid sequence according to the amino acid sequence set forth in SEQ ID NOs: 676, 701, and 1340-41.

[0884] In some embodiments, a mixture of the present invention can comprise one or more PFIPs and one or more CRIPs, wherein the one or more CRIPs is one or more peptides derived from Brachypelma albiceps, e.g., a peptide having an amino acid sequence according to the amino acid sequence set forth in SEQ ID NOs: 844, 848, and 1217-18.

[0885] In some embodiments, a mixture of the present invention can comprise one or more PFIPs and one or more CRIPs, wherein the one or more CRIPs is one or more peptides derived from Brachypelma smithi, e.g., a peptide having an amino acid sequence according to the amino acid sequence set forth in SEQ ID NOs: 845, 850, 868, 877, 1219-20, and 1774.

[0886] In some embodiments, a mixture of the present invention can comprise one or more PFIPs and one or more CRIPs, wherein the one or more CRIPs is one or more peptides derived from Buthacus arenicola, e.g., a peptide having an amino acid sequence according to the amino acid sequence set forth in SEQ ID NOs: 699, 1339.

[0887] In some embodiments, a mixture of the present invention can comprise one or more PFIPs and one or more CRIPs, wherein the one or more CRIPs is one or more peptides derived from Buthotus judaicus, e.g., a peptide having an amino acid sequence according to the amino acid sequence set forth in SEQ ID NOs: 649, 691, and 698.

[0888] In some embodiments, a mixture of the present invention can comprise one or more PFIPs and one or more CRIPs, wherein the one or more CRIPs is one or more peptides derived from Buthus eupeus, e.g., a peptide having an amino acid sequence according to the amino acid sequence set forth in SEQ ID NOs1322, 1324-26, and 1334.

[0889] In some embodiments, a mixture of the present invention can comprise one or more PFIPs and one or more CRIPs, wherein the one or more CRIPs is one or more peptides derived from Buthus martensii, e.g., a peptide having an amino acid sequence according to the amino acid sequence set forth in SEQ ID NOs: 1342-46.

[0890] In some embodiments, a mixture of the present invention can comprise one or more PFIPs and one or more CRIPs, wherein the one or more CRIPs is one or more peptides derived from Buthus occitanus mardochei, e.g., a peptide having an amino acid sequence according to the amino acid sequence set forth in SEQ ID NOs: 679-680, 1347-48.

[0891] In some embodiments, a mixture of the present invention can comprise one or more PFIPs and one or more CRIPs, wherein the one or more CRIPs is one or more peptides derived from Buthus occitanus tunetanus, e.g., a peptide having an amino acid sequence according to the amino acid sequence set forth in SEQ ID NOs: 1301, 1327, 1329, and 1329.

[0892] In some embodiments, a mixture of the present invention can comprise one or more PFIPs and one or more CRIPs, wherein the one or more CRIPs is one or more peptides derived from Buthus sindicus, e.g., a peptide having an amino acid sequence according to the amino acid sequence set forth in SEQ ID NOs: 1300, 1323.

[0893] In some embodiments, a mixture of the present invention can comprise one or more PFIPs and one or more CRIPs, wherein the one or more CRIPs is one or more peptides derived from Calisoga sp., e.g., a peptide having an amino acid sequence according to the amino acid sequence set forth in SEQ ID NOs: 1048-50, 1766.

[0894] In some embodiments, a mixture of the present invention can comprise one or more PFIPs and one or more CRIPs, wherein the one or more CRIPs is one or more peptides derived from Centruroides elegans, e.g., a peptide having an amino acid sequence according to the amino acid sequence set forth in SEQ ID NOs: 1290-94, 1316.

[0895] In some embodiments, a mixture of the present invention can comprise one or more PFIPs and one or more CRIPs, wherein the one or more CRIPs is one or more peptides derived from Centruroides exilicauda, e.g., a peptide having an amino acid sequence according to the amino acid sequence set forth in SEQ ID NO: 1320.

[0896] In some embodiments, a mixture of the present invention can comprise one or more PFIPs and one or more CRIPs, wherein the one or more CRIPs is one or more peptides derived from Centruroides gracilis, e.g., a peptide having an amino acid sequence according to the amino acid sequence set forth in SEQ ID NO: 1317.

[0897] In some embodiments, a mixture of the present invention can comprise one or more PFIPs and one or more CRIPs, wherein the one or more CRIPs is one or more peptides derived from Centruroides limbatus, e.g., a peptide having an amino acid sequence according to the amino acid sequence set forth in SEQ ID NOs: 1277, 1279, 1287-88.

[0898] In some embodiments, a mixture of the present invention can comprise one or more PFIPs and one or more CRIPs, wherein the one or more CRIPs is one or more peptides derived from Centruroides limpidus limpidus, e.g., a peptide having an amino acid sequence according to the amino acid sequence set forth in SEQ ID NOs: 1285, 1289, and 1319.

[0899] In some embodiments, a mixture of the present invention can comprise one or more PFIPs and one or more CRIPs, wherein the one or more CRIPs is one or more peptides derived from Centruroides margaritatus, e.g., a peptide having an amino acid sequence according to the amino acid sequence set forth in SEQ ID NO: 1284.

[0900] In some embodiments, a mixture of the present invention can comprise one or more PFIPs and one or more CRIPs, wherein the one or more CRIPs is one or more peptides derived from Centruroides noxius, e.g., a peptide having an amino acid sequence according to the amino acid sequence set forth in SEQ ID NOs: 687-688, 1264, 1281, 1283, 1286, and 1321.

[0901] In some embodiments, a mixture of the present invention can comprise one or more PFIPs and one or more CRIPs, wherein the one or more CRIPs is one or more peptides derived from Centruroides sculpturatus, e.g., a peptide having an amino acid sequence according to the amino acid sequence set forth in SEQ ID NO: 1318.

[0902] In some embodiments, a mixture of the present invention can comprise one or more PFIPs and one or more CRIPs, wherein the one or more CRIPs is one or more peptides derived from Centruroides suffusus suffuses, e.g., a peptide having an amino acid sequence according to the amino acid sequence set forth in SEQ ID NOs: 689-690.

[0903] In some embodiments, a mixture of the present invention can comprise one or more PFIPs and one or more CRIPs, wherein the one or more CRIPs is one or more peptides derived from Ceratogyrus marshalli, e.g., a peptide having an amino acid sequence according to the amino acid sequence set forth in SEQ ID NOs: 776, 791, and 798.

[0904] In some embodiments, a mixture of the present invention can comprise one or more PFIPs and one or more CRIPs, wherein the one or more CRIPs is one or more peptides derived from Chilobrachys jingzhao, e.g., a peptide having an amino acid sequence according to the amino acid sequence set forth in SEQ ID NOs: 732-736, 934-955.

[0905] In some embodiments, a mixture of the present invention can comprise one or more PFIPs and one or more CRIPs, wherein the one or more CRIPs is one or more peptides derived from Coremiocnemis valida, e.g., a peptide having an amino acid sequence according to the amino acid sequence set forth in SEQ ID NOs: 857, 1056.

[0906] In some embodiments, a mixture of the present invention can comprise one or more PFIPs and one or more CRIPs, wherein the one or more CRIPs is one or more peptides derived from Ctenus ornatus, e.g., a peptide having an amino acid sequence according to the amino acid sequence set forth in SEQ ID NO: 731.

[0907] In some embodiments, a mixture of the present invention can comprise one or more PFIPs and one or more CRIPs, wherein the one or more CRIPs is one or more peptides derived from Cupiennius salei, e.g., a peptide having an amino acid sequence according to the amino acid sequence set forth in SEQ ID NOs: 1047, 1072-73.

[0908] In some embodiments, a mixture of the present invention can comprise one or more PFIPs and one or more CRIPs, wherein the one or more CRIPs is one or more peptides derived from Eucratoscelus constrictus, e.g., a peptide having an amino acid sequence according to the amino acid sequence set forth in SEQ ID NOs: 930, 993-994, 1119-20.

[0909] In some embodiments, a mixture of the present invention can comprise one or more PFIPs and one or more CRIPs, wherein the one or more CRIPs is one or more peptides derived from Grammostola rosea, e.g., a peptide having an amino acid sequence according to the amino acid sequence set forth in SEQ ID NOs: 729-730, 737-738, 778, 829-830, 858-861, 956.

[0910] In some embodiments, a mixture of the present invention can comprise one or more PFIPs and one or more CRIPs, wherein the one or more CRIPs is one or more peptides derived from Hadronyche formidabilis, e.g., a peptide having an amino acid sequence according to the amino acid sequence set forth in SEQ ID NOs: 765, 1110, and 1158.

[0911] In some embodiments, a mixture of the present invention can comprise one or more PFIPs and one or more CRIPs, wherein the one or more CRIPs is one or more peptides derived from Hadronyche infensa, e.g., a peptide having an amino acid sequence according to the amino acid sequence set forth in SEQ ID NOs: 555, 556, 567, 763, 766, 768, 866-867, 913-925, 981-982, and 1159-68.

[0912] In some embodiments, a mixture of the present invention can comprise one or more PFIPs and one or more CRIPs, wherein the one or more CRIPs is one or more peptides derived from Hadronyche venenata, e.g., a peptide having an amino acid sequence according to the amino acid sequence set forth in SEQ ID NOs:878-883.

[0913] In some embodiments, a mixture of the present invention can comprise one or more PFIPs and one or more CRIPs, wherein the one or more CRIPs is one or more peptides derived from Hadronyche versuta, e.g., a peptide having an amino acid sequence according to the amino acid sequence set forth in SEQ ID NOs: 24, 535, 537-541, 543-549, 553, 554, 557-559, 562-566, 568-591, 604-623, 628, 634-635, 653-669, 672-673, 764, 767, 769-773, 884-886, 959, 961-966, 968-969, 971-974, 976-980, 983, 986-992, 1038-42, 1105-06, 1111-18, 1169-1210, 1553-67, 1570-88, and 1591-93.

[0914] In some embodiments, a mixture of the present invention can comprise one or more PFIPs and one or more CRIPs, wherein the one or more CRIPs is one or more peptides derived from Hadrurus gertschi, e.g., a peptide having an amino acid sequence according to the amino acid sequence set forth in SEQ ID NO: 1314.

[0915] In some embodiments, a mixture of the present invention can comprise one or more PFIPs and one or more CRIPs, wherein the one or more CRIPs is one or more peptides derived from Haplopelma hainanum, e.g., a peptide having an amino acid sequence according to the amino acid sequence set forth in SEQ ID NOs: 825-828.

[0916] In some embodiments, a mixture of the present invention can comprise one or more PFIPs and one or more CRIPs, wherein the one or more CRIPs is one or more peptides derived from Haplopelma huwenum, e.g., a peptide having an amino acid sequence according to the amino acid sequence set forth in SEQ ID NOs: 814-824, 835, 862-863, 865, 869-872, 887-912, 931-933, 1057-69, 1083, 1136, 1221.

[0917] In some embodiments, a mixture of the present invention can comprise one or more PFIPs and one or more CRIPs, wherein the one or more CRIPs is one or more peptides derived from Hemiscorpius lepturus, e.g., a peptide having an amino acid sequence according to the amino acid sequence set forth in SEQ ID NO: 1335.

[0918] In some embodiments, a mixture of the present invention can comprise one or more PFIPs and one or more CRIPs, wherein the one or more CRIPs is one or more peptides derived from Heriaeus melloteei, e.g., a peptide having an amino acid sequence according to the amino acid sequence set forth in SEQ ID NOs: 926-927.

[0919] In some embodiments, a mixture of the present invention can comprise one or more PFIPs and one or more CRIPs, wherein the one or more CRIPs is one or more peptides derived from Heterometrus spinifer, e.g., a peptide having an amino acid sequence according to the amino acid sequence set forth in SEQ ID NOs: 1311, 1313.

[0920] In some embodiments, a mixture of the present invention can comprise one or more PFIPs and one or more CRIPs, wherein the one or more CRIPs is one or more peptides derived from Heteropoda venatoria, e.g., a peptide having an amino acid sequence according to the amino acid sequence set forth in SEQ ID NOs: 803-804, 831-834, 856.

[0921] In some embodiments, a mixture of the present invention can comprise one or more PFIPs and one or more CRIPs, wherein the one or more CRIPs is one or more peptides derived from Heteroscodra maculate, e.g., a peptide having an amino acid sequence according to the amino acid sequence set forth in SEQ ID NOs: 779, 793.

[0922] In some embodiments, a mixture of the present invention can comprise one or more PFIPs and one or more CRIPs, wherein the one or more CRIPs is one or more peptides derived from Hololena curta, e.g., a peptide having an amino acid sequence according to the amino acid sequence set forth in SEQ ID NOs: 642-643, 1126-29.

[0923] In some embodiments, a mixture of the present invention can comprise one or more PFIPs and one or more CRIPs, wherein the one or more CRIPs is one or more peptides derived from Hottentotta judaica, e.g., a peptide having an amino acid sequence according to the amino acid sequence set forth in SEQ ID NOs: 677, 1349-51, 1769.

[0924] In some embodiments, a mixture of the present invention can comprise one or more PFIPs and one or more CRIPs, wherein the one or more CRIPs is one or more peptides derived from Hysterocrates gigas, e.g., a peptide having an amino acid sequence according to the amino acid sequence set forth in SEQ ID NO: 802.

[0925] In some embodiments, a mixture of the present invention can comprise one or more PFIPs and one or more CRIPs, wherein the one or more CRIPs is one or more peptides derived from Illawara wisharti, e.g., a peptide having an amino acid sequence according to the amino acid sequence set forth in SEQ ID NOs: 1107, 1211.

[0926] In some embodiments, a mixture of the present invention can comprise one or more PFIPs and one or more CRIPs, wherein the one or more CRIPs is one or more peptides derived from Lasiodora sp, e.g., a peptide having an amino acid sequence according to the amino acid sequence set forth in SEQ ID NO: 864.

[0927] In some embodiments, a mixture of the present invention can comprise one or more PFIPs and one or more CRIPs, wherein the one or more CRIPs is one or more peptides derived from Latrodectus tredecimguttatus, e.g., a peptide having an amino acid sequence according to the amino acid sequence set forth in SEQ ID NOs: 807, 873.

[0928] In some embodiments, a mixture of the present invention can comprise one or more PFIPs and one or more CRIPs, wherein the one or more CRIPs is one or more peptides derived from Leiurus quinquestriatus, e.g., a peptide having an amino acid sequence according to the amino acid sequence set forth in SEQ ID NOs: 648, 674-675, 678, 685-686, 693-694, 696-697, 700, 702, 1278, 1282, 1296-98, 1305, 1328, 1332, 1336, 1352-62, 1770-73.

[0929] In some embodiments, a mixture of the present invention can comprise one or more PFIPs and one or more CRIPs, wherein the one or more CRIPs is one or more peptides derived from Macrothele gigas, e.g., a peptide having an amino acid sequence according to the amino acid sequence set forth in SEQ ID NOs: 836-843, 854, 1088, 1108-09, 1132-35.

[0930] In some embodiments, a mixture of the present invention can comprise one or more PFIPs and one or more CRIPs, wherein the one or more CRIPs is one or more peptides derived from Macrothele raveni, e.g., a peptide having an amino acid sequence according to the amino acid sequence set forth in SEQ ID NOs: 855, 1089.

[0931] In some embodiments, a mixture of the present invention can comprise one or more PFIPs and one or more CRIPs, wherein the one or more CRIPs is one or more peptides derived from Mesobuthus eupeus, e.g., a peptide having an amino acid sequence according to the amino acid sequence set forth in SEQ ID NO: 723.

[0932] In some embodiments, a mixture of the present invention can comprise one or more PFIPs and one or more CRIPs, wherein the one or more CRIPs is one or more peptides derived from Mesobuthus martensii, e.g., a peptide having an amino acid sequence according to the amino acid sequence set forth in SEQ ID NO: 1275.

[0933] In some embodiments, a mixture of the present invention can comprise one or more PFIPs and one or more CRIPs, wherein the one or more CRIPs is one or more peptides derived from Mesobuthus tamulus, e.g., a peptide having an amino acid sequence according to the amino acid sequence set forth in SEQ ID NOs: 1274, 1276, 1307-08, 1763.

[0934] In some embodiments, a mixture of the present invention can comprise one or more PFIPs and one or more CRIPs, wherein the one or more CRIPs is one or more peptides derived from Missulena bradleyi, e.g., a peptide having an amino acid sequence according to the amino acid sequence set forth in SEQ ID NOs: 762, 1091, and 1137.

[0935] In some embodiments, a mixture of the present invention can comprise one or more PFIPs and one or more CRIPs, wherein the one or more CRIPs is one or more peptides derived from Odonthobuthus doriae, e.g., a peptide having an amino acid sequence according to the amino acid sequence set forth in SEQ ID NO: 1363.

[0936] In some embodiments, a mixture of the present invention can comprise one or more PFIPs and one or more CRIPs, wherein the one or more CRIPs is one or more peptides derived from Orthochirus scrobiculosus, e.g., a peptide having an amino acid sequence according to the amino acid sequence set forth in SEQ ID NO: 1299.

[0937] In some embodiments, a mixture of the present invention can comprise one or more PFIPs and one or more CRIPs, wherein the one or more CRIPs is one or more peptides derived from Oxyopes lineatus, e.g., a peptide having an amino acid sequence according to the amino acid sequence set forth in SEQ ID NO: 1212.

[0938] In some embodiments, a mixture of the present invention can comprise one or more PFIPs and one or more CRIPs, wherein the one or more CRIPs is one or more peptides derived from Pandinus imperator, e.g., a peptide having an amino acid sequence according to the amino acid sequence set forth in SEQ ID NOs: 1263, 1309, and 1315.

[0939] In some embodiments, a mixture of the present invention can comprise one or more PFIPs and one or more CRIPs, wherein the one or more CRIPs is one or more peptides derived from Parabuthus granulatus, e.g., a peptide having an amino acid sequence according to the amino acid sequence set forth in SEQ ID NO: 1267.

[0940] In some embodiments, a mixture of the present invention can comprise one or more PFIPs and one or more CRIPs, wherein the one or more CRIPs is one or more peptides derived from Parabuthus transvaalicus, e.g., a peptide having an amino acid sequence according to the amino acid sequence set forth in SEQ ID NO: 1280.

[0941] In some embodiments, a mixture of the present invention can comprise one or more PFIPs and one or more CRIPs, wherein the one or more CRIPs is one or more peptides derived from Parabuthus villosus, e.g., a peptide having an amino acid sequence according to the amino acid sequence set forth in SEQ ID NOs: 1265-66.

[0942] In some embodiments, a mixture of the present invention can comprise one or more PFIPs and one or more CRIPs, wherein the one or more CRIPs is one or more peptides derived from Paraphysa scrofa, e.g., a peptide having an amino acid sequence according to the amino acid sequence set forth in SEQ ID NOs: 799, 846, and 849.

[0943] In some embodiments, a mixture of the present invention can comprise one or more PFIPs and one or more CRIPs, wherein the one or more CRIPs is one or more peptides derived from Phoneutria keyserlingi, e.g., a peptide having an amino acid sequence according to the amino acid sequence set forth in SEQ ID NOs: 784, 796, and 1087.

[0944] In some embodiments, a mixture of the present invention can comprise one or more PFIPs and one or more CRIPs, wherein the one or more CRIPs is one or more peptides derived from Phoneutria nigriventer, e.g., a peptide having an amino acid sequence according to the amino acid sequence set forth in SEQ ID NOs: 760, 774, 785, 787-788, 790, 797, 808, 1043-45, 1074, 1086, 1090, 1097-1102.

[0945] In some embodiments, a mixture of the present invention can comprise one or more PFIPs and one or more CRIPs, wherein the one or more CRIPs is one or more peptides derived from Phoneutria reidyi, e.g., a peptide having an amino acid sequence according to the amino acid sequence set forth in SEQ ID NOs: 775, 786, 789, and 1103.

[0946] In some embodiments, a mixture of the present invention can comprise one or more PFIPs and one or more CRIPs, wherein the one or more CRIPs is one or more peptides derived from Pireneitega luctuosa, e.g., a peptide having an amino acid sequence according to the amino acid sequence set forth in SEQ ID NOs: 1092-95.

[0947] In some embodiments, a mixture of the present invention can comprise one or more PFIPs and one or more CRIPs, wherein the one or more CRIPs is one or more peptides derived from Plectreurys tristis, e.g., a peptide having an amino acid sequence according to the amino acid sequence set forth in SEQ ID NOs: 1051-55, 1085, 1213, and 1775.

[0948] In some embodiments, a mixture of the present invention can comprise one or more PFIPs and one or more CRIPs, wherein the one or more CRIPs is one or more peptides derived from Plesiophrictus guangxiensis, e.g., a peptide having an amino acid sequence according to the amino acid sequence set forth in SEQ ID NOs: 811-813.

[0949] In some embodiments, a mixture of the present invention can comprise one or more PFIPs and one or more CRIPs, wherein the one or more CRIPs is one or more peptides derived from Psalmopoeus cambridgei, e.g., a peptide having an amino acid sequence according to the amino acid sequence set forth in SEQ ID NOs: 780, 794, 800, 809-810, 847.

[0950] In some embodiments, a mixture of the present invention can comprise one or more PFIPs and one or more CRIPs, wherein the one or more CRIPs is one or more peptides derived from Scorpio maurus, e.g., a peptide having an amino acid sequence according to the amino acid sequence set forth in SEQ ID NOs: 647, 722, 1310, and 1330.

[0951] In some embodiments, a mixture of the present invention can comprise one or more PFIPs and one or more CRIPs, wherein the one or more CRIPs is one or more peptides derived from Segestria florentina, e.g., a peptide having an amino acid sequence according to the amino acid sequence set forth in SEQ ID NOs: 1076-82.

[0952] In some embodiments, a mixture of the present invention can comprise one or more PFIPs and one or more CRIPs, wherein the one or more CRIPs is one or more peptides derived from Stromatopelma calceatum, e.g., a peptide having an amino acid sequence according to the amino acid sequence set forth in SEQ ID NOs: 781-782.

[0953] In some embodiments, a mixture of the present invention can comprise one or more PFIPs and one or more CRIPs, wherein the one or more CRIPs is one or more peptides derived from Theraphosa blondi, e.g., a peptide having an amino acid sequence according to the amino acid sequence set forth in SEQ ID NOs: 783, 795, and 801.

[0954] In some embodiments, a mixture of the present invention can comprise one or more PFIPs and one or more CRIPs, wherein the one or more CRIPs is one or more peptides derived from Thrixopelma pruriens, e.g., a peptide having an amino acid sequence according to the amino acid sequence set forth in SEQ ID NOs: 852-853.

[0955] In some embodiments, a mixture of the present invention can comprise one or more PFIPs and one or more CRIPs, wherein the one or more CRIPs is one or more peptides derived from Tityus cambridgei, e.g., a peptide having an amino acid sequence according to the amino acid sequence set forth in SEQ ID NOs: 1304.

[0956] In some embodiments, a mixture of the present invention can comprise one or more PFIPs and one or more CRIPs, wherein the one or more CRIPs is one or more peptides derived from Tityus costatus, e.g., a peptide having an amino acid sequence according to the amino acid sequence set forth in SEQ ID NO: 1270.

[0957] In some embodiments, a mixture of the present invention can comprise one or more PFIPs and one or more CRIPs, wherein the one or more CRIPs is one or more peptides derived from Tityus discrepans, e.g., a peptide having an amino acid sequence according to the amino acid sequence set forth in SEQ ID NOs: 1273, 1303.

[0958] In some embodiments, a mixture of the present invention can comprise one or more PFIPs and one or more CRIPs, wherein the one or more CRIPs is one or more peptides derived from Tityus serrulatus, e.g., a peptide having an amino acid sequence according to the amino acid sequence set forth in SEQ ID NOs: 703, 1268, 1302, and 1364.

[0959] In some embodiments, a mixture of the present invention can comprise one or more PFIPs and one or more CRIPs, wherein the one or more CRIPs is one or more peptides derived from Tityus trivittatus, e.g., a peptide having an amino acid sequence according to the amino acid sequence set forth in SEQ ID NO: 1269.

[0960] In some embodiments, a mixture of the present invention can comprise one or more PFIPs and one or more CRIPs, wherein the one or more CRIPs is one or more peptides derived from Tityus zulianus, e.g., a peptide having an amino acid sequence according to the amino acid sequence set forth in SEQ ID NOs: 704, 1365.

[0961] In some embodiments, a mixture of the present invention can comprise one or more sea anemone peptides.

[0962] In some embodiments, a mixture of the present invention can comprise one or more PFIPs and one or more CRIPs, wherein the one or more CRIPs is one or more peptides derived from Actinia equine, e.g., a peptide having an amino acid sequence according to the amino acid sequence set forth in SEQ ID NO: 1250.

[0963] In some embodiments, a mixture of the present invention can comprise one or more PFIPs and one or more CRIPs, wherein the one or more CRIPs is one or more peptides derived from Anemonia erythraea, e.g., a peptide having an amino acid sequence according to the amino acid sequence set forth in SEQ ID NO: 1222.

[0964] In some embodiments, a mixture of the present invention can comprise one or more PFIPs and one or more CRIPs, wherein the one or more CRIPs is one or more peptides derived from Anemonia sulcata, e.g., a peptide having an amino acid sequence according to the amino acid sequence set forth in SEQ ID NOs: 1225-26, 1231, 1237, and 1245.

[0965] In some embodiments, a mixture of the present invention can comprise one or more PFIPs and one or more CRIPs, wherein the one or more CRIPs is one or more peptides derived from Anthopleura elegantissima, e.g., a peptide having an amino acid sequence according to the amino acid sequence set forth in SEQ ID NOs: 1223-24, 1229-30, 1235-36, and 1249.

[0966] In some embodiments, a mixture of the present invention can comprise one or more PFIPs and one or more CRIPs, wherein the one or more CRIPs is one or more peptides derived from Anthopleura fuscoviridis, e.g., a peptide having an amino acid sequence according to the amino acid sequence set forth in SEQ ID NOs: 1232, 1238.

[0967] In some embodiments, a mixture of the present invention can comprise one or more PFIPs and one or more CRIPs, wherein the one or more CRIPs is one or more peptides derived from Anthopleura xanthogrammica, e.g., a peptide having an amino acid sequence according to the amino acid sequence set forth in SEQ ID NOs: 1247-48, 1256-60.

[0968] In some embodiments, a mixture of the present invention can comprise one or more PFIPs and one or more CRIPs, wherein the one or more CRIPs is one or more peptides derived from Bunodosoma caissarum, e.g., a peptide having an amino acid sequence according to the amino acid sequence set forth in SEQ ID NOs: 1252-53.

[0969] In some embodiments, a mixture of the present invention can comprise one or more PFIPs and one or more CRIPs, wherein the one or more CRIPs is one or more peptides derived from Bunodosoma cangicum, e.g., a peptide having an amino acid sequence according to the amino acid sequence set forth in SEQ ID NOs: 1254, 1261-62.

[0970] In some embodiments, a mixture of the present invention can comprise one or more PFIPs and one or more CRIPs, wherein the one or more CRIPs is one or more peptides derived from Bunodosoma granulifera, e.g., a peptide having an amino acid sequence according to the amino acid sequence set forth in SEQ ID NOs: 1227-28, 1251.

[0971] In some embodiments, a mixture of the present invention can comprise one or more PFIPs and one or more CRIPs, wherein the one or more CRIPs is one or more peptides derived from Heteractis crispa, e.g., a peptide having an amino acid sequence according to the amino acid sequence set forth in SEQ ID NOs: 1233, 1239, 1242, 1244, and 1246.

[0972] In some embodiments, a mixture of the present invention can comprise one or more PFIPs and one or more CRIPs, wherein the one or more CRIPs is one or more peptides derived from Parasicyonis actinostoloides, e.g., a peptide having an amino acid sequence according to the amino acid sequence set forth in SEQ ID NOs: 1241.

[0973] In some embodiments, a mixture of the present invention can comprise one or more PFIPs and one or more CRIPs, wherein the one or more CRIPs is one or more peptides derived from Radianthus paumotensis, e.g., a peptide having an amino acid sequence according to the amino acid sequence set forth in SEQ ID NOs: 1240, 1243.

[0974] In some embodiments, a mixture of the present invention can comprise one or more PFIPs and one or more CRIPs, wherein the one or more CRIPs is one or more peptides derived from Stoichactis helianthus, e.g., a peptide having an amino acid sequence according to the amino acid sequence set forth in SEQ ID NOs: 1234, 1255.

[0975] In some embodiments, a mixture of the present invention can comprise one or more PFIPs and one or more CRIPs, wherein the one or more CRIPs is one or more peptides derived from a cone shell, e.g., a conotoxin.

[0976] In some embodiments, a mixture of the present invention can comprise one or more PFIPs and one or more CRIPs, wherein the one or more CRIPs is one or more peptides derived from Conus amadis, e.g., a peptide having an amino acid sequence according to the amino acid sequence set forth in SEQ ID NO: 996.

[0977] In some embodiments, a mixture of the present invention can comprise one or more PFIPs and one or more CRIPs, wherein the one or more CRIPs is one or more peptides derived from Conus catus, e.g., a peptide having an amino acid sequence according to the amino acid sequence set forth in SEQ ID NO: 997.

[0978] In some embodiments, a mixture of the present invention can comprise one or more PFIPs and one or more CRIPs, wherein the one or more CRIPs is one or more peptides derived from Conus ermineus, e.g., a peptide having an amino acid sequence according to the amino acid sequence set forth in SEQ ID NOs: 998-999.

[0979] In some embodiments, a mixture of the present invention can comprise one or more PFIPs and one or more CRIPs, wherein the one or more CRIPs is one or more peptides derived from Conus geographus, e.g., a peptide having an amino acid sequence according to the amino acid sequence set forth in SEQ ID NOs: 1000-08.

[0980] In some embodiments, a mixture of the present invention can comprise one or more PFIPs and one or more CRIPs, wherein the one or more CRIPs is one or more peptides derived from Conus gloriamaris, e.g., a peptide having an amino acid sequence according to the amino acid sequence set forth in SEQ ID NO: 1009.

[0981] In some embodiments, a mixture of the present invention can comprise one or more PFIPs and one or more CRIPs, wherein the one or more CRIPs is one or more peptides derived from Conus kinoshitai, e.g., a peptide having an amino acid sequence according to the amino acid sequence set forth in SEQ ID NO: 1010.

[0982] In some embodiments, a mixture of the present invention can comprise one or more PFIPs and one or more CRIPs, wherein the one or more CRIPs is one or more peptides derived from Conus magus, e.g., a peptide having an amino acid sequence according to the amino acid sequence set forth in SEQ ID NOs: 1011-15.

[0983] In some embodiments, a mixture of the present invention can comprise one or more PFIPs and one or more CRIPs, wherein the one or more CRIPs is one or more peptides derived from Conus marmoreus, e.g., a peptide having an amino acid sequence according to the amino acid sequence set forth in SEQ ID NOs: 1016-19.

[0984] In some embodiments, a mixture of the present invention can comprise one or more PFIPs and one or more CRIPs, wherein the one or more CRIPs is one or more peptides derived from Conus purpurascens, e.g., a peptide having an amino acid sequence according to the amino acid sequence set forth in SEQ ID NOs: 1020-25.

[0985] In some embodiments, a mixture of the present invention can comprise one or more PFIPs and one or more CRIPs, wherein the one or more CRIPs is one or more peptides derived from Conus stercusmuscarum, e.g., a peptide having an amino acid sequence according to the amino acid sequence set forth in SEQ ID NO: 1026.

[0986] In some embodiments, a mixture of the present invention can comprise one or more PFIPs and one or more CRIPs, wherein the one or more CRIPs is one or more peptides derived from Conus striatus, e.g., a peptide having an amino acid sequence according to the amino acid sequence set forth in SEQ ID NOs: 1027-29.

[0987] In some embodiments, a mixture of the present invention can comprise one or more PFIPs and one or more CRIPs, wherein the one or more CRIPs is one or more peptides derived from Conus textile, e.g., a peptide having an amino acid sequence according to the amino acid sequence set forth in SEQ ID NOs: 1030-31.

[0988] In some embodiments, a mixture of the present invention can comprise one or more PFIPs and one or more CRIPs, wherein the one or more CRIPs is one or more peptides derived from Conus tulipa, e.g., a peptide having an amino acid sequence according to the amino acid sequence set forth in SEQ ID NOs: 1032-33.

[0989] In some embodiments, a mixture of the present invention can comprise one or more PFIPs and one or more CRIPs, wherein the one or more CRIPs is one or more peptides derived from Striated cone, e.g., a peptide having an amino acid sequence according to the amino acid sequence set forth in SEQ ID NO: 1034.

[0990] In some embodiments, a mixture of the present invention can comprise one or more ACTX peptides having an amino acid sequence of SEQ ID NOs: 5-6, 24, 534-635, 650-673, 724-728, 763-773, 866-867, 874-876, 878-886, 913-925, 958-992, 1038-42, 1104-1106, 1110-1118, 1141-1157, 1159-1210, and 1553-1593.

[0991] For example, in some embodiments, a mixture of the present invention can comprise a spider toxin having an amino acid sequence according to SEQ ID NOs: 1043-1221.

[0992] In some embodiments, a mixture of the present invention can comprise a scorpion toxin having an amino acid sequence according to SEQ ID NOs: 1263-1365.

[0993] In some embodiments, a mixture of the present invention can comprise one or more U-ACTX peptides, Omega-ACTX peptides, Kappa-ACTX peptides, or a combination thereof.

[0994] In some embodiments, a mixture of the present invention can comprise one or more of a U-ACTX-Hv1a, U+2-ACTX-Hv1a, rU-ACTX-Hv1a, rU-ACTX-Hv1b, rκ-ACTX-Hv1c, ω-ACTX-Hv1a, and/or ω-ACTX-Hv1a+2, or a combination thereof.

[0995] In some embodiments, a mixture of the present invention can comprise one or more Kappa-AcTx-Hv1c toxins. In some embodiments, the mixture of the present invention can comprise one or more Kappa-AcTx-Hv1c toxins having an amino acid sequence according to the amino acid sequence set forth in SEQ ID NO: 1594.

[0996] In some embodiments, a mixture of the present invention can comprise one or more Omega-HXTX-Ar1d toxins. In some embodiments, the mixture of the present invention can comprise one or more Omega-HXTX-Ar1d toxins having an amino acid sequence according to the amino acid sequence set forth in SEQ ID NO: 1595.

[0997] In some embodiments, a mixture of the present invention can comprise a combination of one or more PFIPs, and one or more co/x-HXTX-Hv1a peptides, one or more U+2-ACTX-Hv1a peptides, or a combination thereof.

[0998] In some embodiments, the mixture of the present invention provides for a CRIP having the amino acid sequence that is

(SEQ ID NO: 5)
″GSQYCVPVDQPCSLNTQPCCDDATCTQERNENGHTVYYCRA″.

[0999] In some embodiments, a mixture of the present invention can comprise a combination of one or more PFIPs, and one or more ctenitoxins (CNTXs).

[1000] For example, in some embodiments, a mixture of the present invention can comprise one or more γ-CNTX-Pn1a peptides.

[1001] In some embodiments, a mixture of the present invention can comprise a γ-CNTX-Pn1a having an amino acid sequence according the amino acid sequence set forth in SEQ ID NO: 1778.

[1002] In some embodiments, a mixture of the present invention can comprise a γ-CNTX-Pn1a having an amino acid sequence of

(SEQ ID NO: 1778)
GSCADINGACKSDCDCCGDSVTCDCYWSDSCKCRESNFKIGMAIRKKFC.

[1003] In some embodiments, a mixture of the present invention can comprise one or more PFIPs and one or more sea anemone toxins, e.g., an Av2 toxin, an Av3 toxin, and/or an Av3-Variant Polypeptide (AVP).

[1004] In some embodiments, a mixture of the present invention can comprise one or more Av2 toxins having an amino acid sequence according the amino acid sequence set forth in SEQ ID NO: 1779.

[1005] In some embodiments, a mixture of the present invention can comprise one or more Av3 toxins having an amino acid sequence according the amino acid sequence set forth in SEQ ID NO: 1780.

[1006] In some embodiments, a mixture of the present invention can comprise one or more Av3-Variant Polypeptides (AVPs) having an amino acid sequence according the amino acid sequence set forth in SEQ ID NOs: 1781 and 1782.

[1007] In some embodiments, a mixture of the present invention can comprise two types of insecticidal peptides, wherein the first type of insecticidal peptide is a Pore Forming Insecticidal Protein (PFIP), and the second type of insecticidal peptide is a Cysteine Rich Insecticidal Peptide (CRIP), wherein the PFIP is a Becker Bti™, a NOVODOR® FC Btt, or a BioProtec Plus™ Btk; and wherein the CRIP is an atracotoxin (ACTX), ctenitoxin (CNTX), or Av3-Variant Polypeptide (AVP).

[1008] In some embodiments, a mixture of the present invention can comprise one or more of any of the PFIPs as described herein, and one or more of any of the CRIPS as described herein.

[1009] Illustrative Mixtures, Compositions, and Combinations

[1010] Any of the aforementioned PFIPs or CRIPs described herein and/or methods described herein, can be used to produce one or more polypeptides compositions, formulations, and/or compositions comprising one or more PFIPs and one or more CRIPS as described herein.

[1011] In some embodiments, a PFIP and a CRIP can have an amino acid sequence as set forth in sequence listing or herein, including all of the polynucleotides and/or coding genes as described in the references provided above and herein-when applicable. Specific examples of PFIPs and CRIPs, disclosed for purposes of providing examples and not intended to be limiting in any way, are the abovementioned PFIPs and CRIPs (and their homologies where applicable), and in particular peptides and nucleotides including CRIPs, i.e., the atracotoxin (ACTX), the ctenitoxin (CNTX), and the Av3-Variant Polypeptide (AVP).

[1012] Described and incorporated by reference to the CRIP polypeptides identified herein are homologous variants of sequences mentioned, having homology to such sequences or referred to herein, which are also identified and claimed as suitable for making special according to the processes described herein, including all homologous sequences having at least any of the following percent identities to any of the sequences disclosed here or to any sequence incorporated by reference: 50%, 55%, 60%, 65%, 70%, 75%, 80%, 85%, 90%, 95%, 96%, 97%, 98%, or 99% or greater identity or 100% identity to any and all sequences identified in the sequences noted above, and to any other sequence identified herein, including each and every sequence in the sequence listing of this application. When the term homologous or homology is used herein with a number such as 50% or greater, then what is meant is percent identity or percent similarity between the two peptides. When homologous or homology is used without a numeric percent then it refers to two peptide sequences that are closely related in the evolutionary or developmental aspect in that they share common physical and functional aspects, like topical toxicity and similar size (i.e., the homolog being within 100% greater length or 50% shorter length of the peptide specifically mentioned herein or identified by reference herein as above).

[1013] Sprayable Compositions

[1014] Examples of spray products of the present invention can include field sprayable formulations for agricultural usage and indoor sprays for use in interior spaces in a residential or commercial space. In some embodiments, residual sprays or space sprays comprising a composition comprising one or more PFIPs and one or more CRIPs can be used to reduce or eliminate insect pests in an interior space. Surface spraying indoors (SSI) is the technique of applying a variable volume sprayable volume of an insecticide onto indoor surfaces where vectors rest, such as on walls, windows, floors and ceilings. The primary goal of variable volume sprayable volume is to reduce the lifespan of the insect pest, (for example, a fly, a flea, a tick, or a mosquito vector) and thereby reduce or interrupt disease transmission. The secondary impact is to reduce the density of insect pests within the treatment area. SSI can be used as a method for the control of insect pest vector diseases, such as Lyme disease, Salmonella, Chikungunya virus, Zika virus, and malaria, and can also be used in the management of parasites carried by insect vectors, such as Leishmaniasis and Chagas disease. Many mosquito vectors that harbor Zika virus, Chikungunya virus, and malaria include endophilic mosquito vectors, resting inside houses after taking a blood meal. These mosquitoes are particularly susceptible to control through surface spraying indoors (SSI) with a sprayable composition comprising a composition comprising one or more PFIPs and one or more CRIPs. As its name implies, SSI involves applying the composition onto the walls and other surfaces of a house with a residual insecticide. In one embodiment, the composition containing a composition comprising one or more PFIPs and one or more CRIPs and one or more non-CRIP peptides, polypeptides and proteins will knock down insect pests that come in contact with these surfaces. SSI does not directly prevent people from being bitten by mosquitoes. Rather, it usually controls insect pests after they have blood fed, if they come to rest on the sprayed surface. SSI thus prevents transmission of infection to other persons. To be effective, SSI must be applied to a very high proportion of households in an area (usually greater than 40-80 percent). Therefore, sprays in accordance with the invention having good residual efficacy and acceptable odor are particularly suited as a component of integrated insect pest vector management or control solutions.

[1015] In contrast to SSI, which requires that the active composition comprising one or more PFIPs and one or more CRIPs is bound to surfaces of dwellings, such as walls or ceilings, as with a paint, for example, space spray products of the invention rely on the production of a large number of small insecticidal droplets intended to be distributed through a volume of air over a given period of time. When these droplets impact on a target insect pest, they deliver a knockdown effective dose of the composition comprising one or more PFIPs and one or more CRIPs effective to control the insect pest. The traditional methods for generating a space-spray include thermal fogging (whereby a dense cloud of a composition comprising one or more PFIPs and one or more CRIPs composition comprising droplets is produced giving the appearance of a thick fog) and Ultra Low Volume (ULV), whereby droplets are produced by a cold, mechanical aerosol-generating machine. Ready-to-use aerosols such as aerosol cans may also be used.

[1016] Because large areas can be treated at any one time, the foregoing method is a very effective way to rapidly reduce the population of flying insect pests in a specific area. And, because there is very limited residual activity from the application, it must be repeated at intervals of 5-7 days in order to be fully effective. This method can be particularly effective in epidemic situations where rapid reduction in insect pest numbers is required. As such, it can be used in urban dengue control campaigns.

[1017] Effective space-spraying is generally dependent upon the following specific principles. Target insects are usually flying through the spray cloud (or are sometimes impacted whilst resting on exposed surfaces). The efficiency of contact between the spray droplets and target insects is therefore crucial. This is achieved by ensuring that spray droplets remain airborne for the optimum period of time and that they contain the right dose of insecticide. These two issues are largely addressed through optimizing the droplet size. If droplets are too big they drop to the ground too quickly and don't penetrate vegetation or other obstacles encountered during application (limiting the effective area of application). If one of these big droplets impacts an individual insect then it is also “overkill,” because a high dose will be delivered per individual insect. If droplets are too small then they may either not deposit on a target insect (no impaction) due to aerodynamics or they can be carried upwards into the atmosphere by convection currents. The optimum size of droplets for space-spray application are droplets with a Volume Median Diameter (VMD) of 10-25 microns.

[1018] The active compositions of the present invention comprising at least one composition comprising one or more PFIPs and one or more CRIPs may be made available in a spray product as an aerosol-based application, including aerosolized foam applications. Pressurized cans are the typical vehicle for the formation of aerosols. An aerosol propellant that is compatible with the composition comprising one or more PFIPs and one or more CRIPs is used. Preferably, a liquefied-gas type propellant is used.

[1019] Suitable propellants include compressed air, carbon dioxide, butane and nitrogen. The concentration of the propellant in the active compound composition is from about 5 percent to about 40 percent by weight of the pyridine composition, preferably from about 15 percent to about 30 percent by weight of the composition comprising one or more PFIPs and one or more CRIPs containing composition.

[1020] In one embodiment, the composition comprising one or more PFIPs and one or more CRIPs containing formulations of the invention can also include one or more foaming agents. Foaming agents that can be used include sodium laureth sulfate, cocamide DEA, and cocamidopropyl betaine. Preferably, the sodium laureth sulfate, cocamide DEA and cocamidopropyl are used in combination. The concentration of the foaming agent(s) in the active compound composition is from about 10 percent to about 25 percent by weight, more preferably 15 percent to 20 percent by weight of the composition.

[1021] When such formulations are used in an aerosol application not containing foaming agents, the active compositions of the present invention can be used without the need for mixing directly prior to use. However, aerosol formulations containing the foaming agents do require mixing (i.e., shaking) immediately prior to use. In addition, if the formulations containing foaming agents are used for an extended time, they may require additional mixing at periodic intervals during use.

[1022] In some embodiments, a dwelling area may also be treated with an active composition comprising one or more PFIPs and one or more CRIPs composition of the present invention by using a burning formulation, such as a candle, a smoke coil or a piece of incense containing the composition. For example, composition may be comprised in household products such as “heated” air fresheners in which insecticidal compositions are released upon heating, for example, electrically, or by burning. The active compound compositions of the present invention containing a composition comprising one or more PFIPs and one or more CRIPs may be made available in a spray product as an aerosol, a mosquito coil, and/or a vaporizer or fogger.

[1023] In some embodiments, fabrics and garments may be made containing a pesticidal effective composition comprising a composition comprising one or more PFIPs and one or more CRIPs of the present disclosure. In some embodiments, the concentration of the composition comprising one or more PFIPs and one or more CRIPs in the polymeric material, fiber, yarn, weave, net, or substrate described herein, can be varied within a relatively wide concentration range from, for example 0.05 to 15 percent by weight, preferably 0.2 to 10 percent by weight, more preferably 0.4 to 8 percent by weight, especially 0.5 to 5, such as 1 to 3, percent by weight.

[1024] Similarly, the concentration of the composition comprising one or more PFIPs and one or more CRIPs in the composition of the invention (whether for treating surfaces or for coating a fiber, yarn, net, weave) can be varied within a relatively wide concentration range from, for example 0.1 to 70 percent by weight, such as 0.5 to 50 percent by weight, preferably 1 to 40 percent by weight, more preferably 5 to 30 percent by weight, especially 10 to 20 percent by weight.

[1025] The concentration of the composition comprising one or more PFIPs and one or more CRIPs may be chosen according to the field of application such that the requirements concerning knockdown efficacy, durability and toxicity are met. Adapting the properties of the material can also be accomplished and so custom-tailored textile fabrics are obtainable in this way.

[1026] Accordingly an effective amount of a composition comprising one or more PFIPs and one or more CRIPs can depend on the specific use pattern, the insect pest against which control is most desired and the environment in which composition comprising one or more PFIPs and one or more CRIPs will be used. Therefore, an effective amount of a composition comprising one or more PFIPs and one or more CRIPs is sufficient that control of an insect pest is achieved.

[1027] In some embodiments, the present disclosure provides compositions or formulations for coating walls, floors and ceilings inside of buildings and for coating a substrate or non-living material, which comprise a composition comprising one or more PFIPs and one or more CRIPs. The inventive compositions can be prepared using known techniques for the purpose in mind, which could contain a binder to facilitate the binding of the compound to the surface or other substrate. Agents useful for binding are known in the art and tend to be polymeric in form. The type of binder suitable for a compositions to be applied to a wall surface having particular porosities and/or binding characteristics would be different compared to a fiber, yarn, weave or net—thus, a skilled person, based on known teachings, would select a suitable binder based on the desired surface and/or substrate.

[1028] Typical binders are poly vinyl alcohol, modified starch, poly vinyl acrylate, polyacrylic, polyvinyl acetate co polymer, polyurethane, and modified vegetable oils. Suitable binders can include latex dispersions derived from a wide variety of polymers and co-polymers and combinations thereof. Suitable latexes for use as binders in the inventive compositions comprise polymers and copolymers of styrene, alkyl styrenes, isoprene, butadiene, acrylonitrile lower alkyl acrylates, vinyl chloride, vinylidene chloride, vinyl esters of lower carboxylic acids and alpha, beta-ethylenically unsaturated carboxylic acids, including polymers containing three or more different monomer species copolymerized therein, as well as post-dispersed suspensions of silicones or polyurethanes. Also suitable may be a polytetrafluoroethylene (PTFE) polymer for binding the active ingredient to other surfaces.

[1029] In some exemplary embodiments, an insecticidal formulation according to the present disclosure may comprises at least one CRIP, or insecticidal protein comprising one or more CRIP, (optionally with a secondary invertebrate pest control agent described herein) and a an excipient, diluent or carrier, such as water, and optionally a polymeric binder and optionally further components such as a dispersing agent, a polymerizing agent, an emulsifying agent, a thickener, an alcohol, a fragrance or any other inert excipients used in the preparation of sprayable insecticides known in the art.

[1030] The polymeric binder binds the pyridine compounds to the surface of the non-living material and ensures a long-term effect. Using the binder reduces the elimination of the pyridine pesticide out of the non-living material due to environmental effects such as rain or due to human impact on the non-living material such as washing and/or cleaning it. Further, additional components can include an additional insecticide compound, and/or a UV stabilizer.

[1031] The inventive compositions can be in a number of different forms or formulation types, such as suspensions, capsules suspensions, and a person skilled in the art can prepare the relevant composition based on the properties of the particular CRIP or insecticidal protein comprising one or more CRIPs, its uses and also application type. For example, the composition comprising one or more PFIPs and one or more CRIPs used in the methods, embodiments and other aspects of the present disclosure may be encapsulated in the formulation. An encapsulated composition comprising one or more PFIPs and one or more CRIPs can provide improved wash-fastness and also longer period of activity. The formulation can be organic based or aqueous based, preferably aqueous based.

[1032] Microencapsulated composition comprising one or more PFIPs and one or more CRIPs suitable for use in the compositions and methods according to the present disclosure may be prepared with any suitable technique known in the art. For example, various processes for microencapsulating material have been previously developed. These processes can be divided into three categories: physical methods, phase separation, and interfacial reaction. In the physical methods category, microcapsule wall material and core particles are physically brought together and the wall material flows around the core particle to form the microcapsule. In the phase separation category, microcapsules are formed by emulsifying or dispersing the core material in an immiscible continuous phase in which the wall material is dissolved and caused to physically separate from the continuous phase, such as by coacervation, and deposit around the core particles. In the interfacial reaction category, microcapsules are formed by emulsifying or dispersing the core material in an immiscible continuous phase and then an interfacial polymerization reaction is caused to take place at the surface of the core particles. The concentration of the composition comprising one or more PFIPs and one or more CRIPs present in the microcapsules can vary from 0.1 to 60% by weight of the microcapsule.

[1033] The formulation used in the composition comprising one or more PFIPs and one or more CRIPs containing compositions, methods, embodiments and other aspects according to the present disclosure may be formed by mixing all ingredients together with water optionally using suitable mixing and/or dispersing aggregates. In general, such a formulation is formed at a temperature of from 10 to 70° C., preferably 15 to 50° C., more preferably 20 to 40° C. Generally, a formulation comprising one or more of (A), (B), (C), and/or (D) is possible, wherein it is possible to use: a composition comprising one or more PFIPs and one or more CRIPs (as pesticide) (A); solid polymer (B); optional additional additives (D); and to disperse them in the aqueous component (C). If a binder is present in a composition of the present invention, it is preferred to use dispersions of the polymeric binder (B) in water as well as aqueous formulations of the composition comprising one or more PFIPs and one or more CRIPs (A) in water which have been separately prepared before. Such separate formulations may contain additional additives for stabilizing (A) and/or (B) in the respective formulations and are commercially available. In a second process step, such raw formulations and optionally additional water (component (C)) are added. Also, combinations of the abovementioned ingredients based on the foregoing scheme are likewise possible, e.g., using a pre-formed dispersion of (A) and/or (B) and mixing it with solid (A) and/or (B). A dispersion of the polymeric binder (B) may be a pre-manufactured dispersion already made by a chemicals manufacturer.

[1034] Moreover, it is also within the scope of the present invention to use “hand-made” dispersions, i.e., dispersions made in small-scale by an end-user. Such dispersions may be made by providing a mixture of about 20 percent of the binder (B) in water, heating the mixture to temperature of 90° C. to 100° C. and intensively stirring the mixture for several hours. It is possible to manufacture the formulation as a final product so that it can be readily used by the end-user for the process according to the present invention. And, it is of course similarly possible to manufacture a concentrate, which may be diluted by the end-user with additional water (C) to the desired concentration for use.

[1035] In an embodiment, a composition suitable for SSI application or a coating formulation containing a composition comprising one or more PFIPs and one or more CRIPs contains the active ingredient and a carrier, such as water, and may also one or more co-formulants selected from a dispersant, a wetter, an anti-freeze, a thickener, a preservative, an emulsifier and a binder or sticker.

[1036] In some embodiments, an exemplary solid formulation of a composition comprising one or more PFIPs and one or more CRIPs, is generally milled to a desired particle size, such as the particle size distribution d(0.5) is generally from 3 to 20, preferably 5 to 15, especially 7 to 12, μm.

[1037] Furthermore, it may be possible to ship the formulation to the end-user as a kit comprising at least a first component comprising a composition comprising one or more PFIPs and one or more CRIPs (A); and a second component comprising at least one polymeric binder (B). Further additives (D) may be a third separate component of the kit, or may be already mixed with components (A) and/or (B). The end-user may prepare the formulation for use by just adding water (C) to the components of the kit and mixing. The components of the kit may also be formulations in water. Of course it is possible to combine an aqueous formulation of one of the components with a dry formulation of the other component(s). As an example, the kit can comprise one formulation of a composition comprising one or more PFIPs and one or more CRIPs (A) and optionally water (C); and a second, separate formulation of at least one polymeric binder (B), water as component (C) and optionally components (D).

[1038] The concentrations of the components (A), (B), (C) and optionally (D) will be selected by the skilled artisan depending of the technique to be used for coating/treating. In general, the amount of a composition comprising one or more PFIPs and one or more CRIPs (A) may be up to 50, preferably 1 to 50, such as 10 to 40, especially 15 to 30, percent by weight, based on weight of the composition. The amount of polymeric binder (B) may be in the range of 0.01 to 30, preferably 0.5 to 15, more preferably 1 to 10, especially 1 to 5, percent by weight, based on weight of the composition. If present, in general the amount of additional components (D) is from 0.1 to 20, preferably 0.5 to 15, percent by weight, based on weight of the composition. If present, suitable amounts of pigments and/or dyestuffs and/or fragrances are in general 0.01 to 5, preferably 0.1 to 3, more preferably 0.2 to 2, percent by weight, based on weight of the composition. A typical formulation ready for use comprises 0.1 to 40, preferably 1 to 30, percent of components (A), (B), and optionally (D), the residual amount being water (C). A typical concentration of a concentrate to be diluted by the end-user may comprise 5 to 70, preferably 10 to 60, percent of components (A), (B), and optionally (D), the residual amount being water (C).

[1039] In some embodiments, a mixture of the present invention can have a ratio of PFIP to CRIP that is about 10,000:1, 5,000:1, 1,000:1, 500:1, 250:1, 200:1, 100:1, 99:1, 95:5, 90:10, 85:15, 80:20, 75:25, 70:30, 65:35, 60:40, 55:45, 1:1, 45:55, 40:60, 35:65, 30:70, 25:75, 20:80, 15:85, 10:90, 5:95, 1:99, 1:100, 1:200, 1:250, 1:500, 1:1,000, 1:5,000, or 1:10,000.

[1040] In some embodiments, a mixture of the present invention can have a ratio of Bti to ACTX that is from about 1:1 to about 1:5000.

[1041] In some embodiments, a mixture of the present invention can have ratio of Bti to ACTX that is about 1:4000.

[1042] In some embodiments, a mixture of the present invention can have a ratio of Btk to ACTX that is from about 1:1 to about 1:10.

[1043] In some embodiments, a mixture of the present invention can have a ratio of Btk to ACTX that is about 1:9.2

[1044] In some embodiments, a mixture of the present invention can have a ratio of Btk to Av3 that is from about 1:1 to about 1:1.5.

[1045] In some embodiments, a mixture of the present invention can have a ratio of Btk to AVP that is about 1:1.375.

[1046] In some embodiments, a mixture of the present invention can have a ratio of Btt to ACTX that is from about 1:1 to about 1:10.

[1047] In some embodiments, a mixture of the present invention can have a ratio of Btt to ACTX is about 1:8.75.

[1048] Method of Using

[1049] In some embodiments, the present disclosure comprises a method for controlling an invertebrate pest in agronomic and/or nonagronomic applications, comprising contacting the invertebrate pest or its environment, a solid surface, including a plant surface or part thereof, with a biologically effective amount of the composition of the present invention. Examples of suitable compositions comprising one or more PFIPs and one or more CRIPS as described herein, include a liquid solution, an emulsion, a powder, a granule, a nanoparticle, a microparticle, or a combination of the above formulated into a compositions.

[1050] In some embodiments, the method provides for providing a composition of at least two types of agents, wherein the first type of agent is a PFIP, and the second type of agent is a CRIP, wherein the PFIP is selected from one or any combination of the PFIPs as described herein, and wherein the CRIP is selected from the one or any combination of the CRIP described herein, and then applying said composition to the locus of an insect.

[1051] In some embodiments, the method provides for using a composition comprising one or more PFIPs and one or more CRIPs to control insecticidal-resistant insects.

[1052] In some embodiments, the method of the present invention provides for protecting a plant from insects comprising, providing a plant which expresses one or more polypeptides, or polynucleotides encoding the same, wherein one type of the polypeptide, or polynucleotide encoding the same, is a PFIP, and the other type of polypeptide, or polynucleotide encoding the same, is a CRIP.

[1053] In some embodiments, the method of the present invention provides for protecting a plant from insecticidal-resistant insects comprising, providing a plant which expresses one or more polypeptides, or polynucleotides encoding the same, wherein one type of the polypeptide, or polynucleotide encoding the same, is a PFIP, and the other type of polypeptide, or polynucleotide encoding the same, is a CRIP.

[1054] In some embodiments, the method of the present invention provides a method for controlling insects comprising, providing to said insect a transgenic plant that comprises in its genome a stably incorporated polynucleotide construct, wherein said polynucleotide construct comprises a first expression cassette operable to encode a PFIP, and a second expression cassette operable to encode a CRIP.

[1055] In some embodiments, the method of the present invention provides a method of combating, controlling, or inhibiting a pest comprising, applying a pesticidally effective amount of a composition comprising one or more of the PFIPs described herein and one or more CRIPS described herein, to the locus of the pest, or to a plant or animal susceptible to an attack by the pest.

[1056] In some embodiments, to achieve contact with a compound or composition of the invention to protect a field crop from invertebrate pests, the compound or composition is typically applied to the seed of the crop before planting, to the foliage (e.g., leaves, stems, flowers, fruits) of crop plants, or to the soil or other growth medium before or after the crop is planted.

[1057] One embodiment of a method of contact is by spraying. Alternatively, a granular composition comprising a one or more PFIPs and one or more CRIPs of the invention can be applied to the plant foliage or the soil. Compounds of this invention can also be effectively delivered through plant uptake by contacting the plant with a composition comprising a compound of this invention applied as a soil drench of a liquid formulation, a granular formulation to the soil, a nursery box treatment or a dip of transplants. Of note is a composition of the present disclosure in the form of a soil drench liquid formulation. Also of note is a method for controlling an invertebrate pest comprising contacting the invertebrate pest or its environment with a biologically effective amount of a one or more PFIPs and one or more CRIPs of the invention of the present disclosure, or with a composition comprising a biologically effective amount of a one or more PFIPs and one or more CRIPs of the invention of the present disclosure. Of further note, in some illustrative embodiments, the illustrative method includes wherein the environment is soil and the composition is applied to the soil as a soil drench formulation. Of further note is that a one or more PFIPs and one or more CRIPs of the invention are also effective by localized application to the locus of infestation. Other methods of contact include application of a compound or a composition of the invention by direct and residual sprays, aerial sprays, gels, seed coatings, microencapsulations, systemic uptake, baits, ear tags, boluses, foggers, fumigants, aerosols, dusts and many others. One embodiment of a method of contact is a dimensionally stable fertilizer granule, stick or tablet comprising a compound or composition of the invention. The compounds of this invention can also be impregnated into materials for fabricating invertebrate control devices (e.g., insect netting, application onto clothing, application into candle formulations and the like).

[1058] In some embodiments, a composition comprising one or more PFIPs and one or more CRIPs of the invention are also useful in seed treatments for protecting seeds from invertebrate pests. In the context of the present disclosure and claims, treating a seed means contacting the seed with a biologically effective amount of a composition comprising one or more PFIPs and one or more CRIPs of the invention of this invention, which is typically formulated as a composition of the invention. This seed treatment protects the seed from invertebrate soil pests and generally can also protect roots and other plant parts in contact with the soil of the seedling developing from the germinating seed. The seed treatment may also provide protection of foliage by translocation of the composition comprising one or more PFIPs and one or more CRIPs of the invention within the developing plant. Seed treatments can be applied to all types of seeds, including those from which plants genetically transformed to express specialized traits will germinate. In addition, a composition comprising one or more PFIPs and one or more CRIPs of the invention can be transformed into a plant or part thereof, for example a plant cell, or plant seed, that is already transformed with proteins toxic to invertebrate pests, such as Bacillus thuringiensis toxins or protein crystals or those expressing herbicide resistance such as glyphosate acetyltransferase, which provides resistance to glyphosate. Representative examples include those expressing proteins toxic to invertebrate pests, such as Bacillus thuringiensis toxins and/or protein crystals, or those expressing herbicide resistance such as glyphosate acetyltransferase, which provides resistance to glyphosate.

[1059] One method of seed treatment is by spraying or dusting the seed with a composition comprising one or more PFIPs and one or more CRIPs of the invention (i.e. as a formulated composition) before sowing the seeds. Compositions formulated for seed treatment generally comprise a film former or adhesive agent. Therefore, typically, a seed coating composition of the present disclosure comprises a biologically effective amount of a composition comprising one or more PFIPs and one or more CRIPs of the invention, and a film former or adhesive agent. Seed can be coated by spraying a flowable suspension concentrate directly into a tumbling bed of seeds and then drying the seeds. Alternatively, other formulation types such as wetted powders, solutions, suspoemulsions, emulsifiable concentrates and emulsions in water can be sprayed on the seed. This process is particularly useful for applying film coatings on seeds. Various coating machines and processes are available to one skilled in the art. Suitable processes include those listed in P. Kosters et al., Seed Treatment: Progress and Prospects, 1994 BCPC Monograph No. 57, and references listed therein.

[1060] The treated seed typically comprises a composition comprising one or more PFIPs and one or more CRIPs of the invention in an amount ranging from about 0.01 g to 1 kg per 100 kg of seed (i.e. from about 0.00001 to 1% by weight of the seed before treatment). A flowable suspension formulated for seed treatment typically comprises from about 0.5 to about 70% of the active ingredient, from about 0.5 to about 30% of a film-forming adhesive, from about 0.5 to about 20% of a dispersing agent, from 0 to about 5% of a thickener, from 0 to about 5% of a pigment and/or dye, from 0 to about 2% of an antifoaming agent, from 0 to about 1% of a preservative, and from 0 to about 75% of a volatile liquid diluent.

[1061] In some embodiments, the present invention provides a method to control insects, said method comprising, providing a mixture of at least two types of peptides, wherein the first type of peptide is a PFIP, and the second type of peptide is a CRIP, wherein the PFIP is selected from one or any combination of the PFIPs described herein); and wherein the CRIP is selected from the one or any combination of the CRIPs described herein (e.g., an atracotoxin (ACTX), a ctenitoxin (CNTX), an Av2 toxin, an Av3 toxin, an Av3-Variant Polypeptide (AVP), or a combination thereof); wherein the PFIP is not fused to the CRIP; and then applying said mixture to the locus of an insect.

[1062] In some embodiments, the present invention provides a method to control insects, wherein the insects are selected from the group consisting of: Achema Sphinx Moth (Hornworm) (Eumorpha achemon); Alfalfa Caterpillar (Colias eurytheme); Almond Moth (Caudra cautella); Amorbia Moth (Amorbia humerosana); Armyworm (Spodoptera spp., e.g. exigua, frugiperda, littoralis, Pseudaletia unipuncta); Artichoke Plume Moth (Platyptilia carduidactyla); Azalea Caterpillar (Datana major); Bagworm (Thyridopteryx); ephemeraeformis); Banana Moth (Hypercompe scribonia); Banana Skipper (Erionota thrax); Blackheaded Budworm (Acleris gloverana); California Oakworm (Phryganidia californica); Spring Cankerworm (Paleacrita merriccata); Cherry Fruitworm (Grapholita packardi); China Mark Moth (Nymphula stagnata); Citrus Cutworm (Xylomyges curialis); Codling Moth (Cydia pomonella); Cranberry Fruitworm (Acrobasis vaccinii); Cross-striped Cabbageworm (Evergestis rimosalis); Cutworm (Noctuid species, Agrotis ipsilon); Douglas Fir Tussock Moth (Orgyia pseudotsugata); Ello Moth (Hornworm) (Erinnyis ello); Elm Spanworm (Ennomos subsignaria); European Grapevine Moth (Lobesia botrana); European Skipper (Thymelicus lineola (Essex Skipper); Fall Webworm (Melissopus latiferreanus; Filbert Leafroller (Archips rosanus; Fruittree Leafroller (Archips argyrospilia; Grape Berry Moth (Paralobesia viteana; Grape Leafroller (Platynota stultana; Grapeleaf Skeletonizer (Harrisina americana (ground only); Green Cloverworm (Plathypena scabra; Greenstriped Mapleworm (Dryocampa rubicunda; Gummosos-Batrachedra; Comosae (Hodges); Gypsy Moth (Lymantria dispar); Hemlock Looper (Lambdina fiscellaria); Hornworm (Manduca spp.); Imported Cabbageworm (Pieris rapae); io Moth (Automeris io); Jack Pine Budworm (Choristoneura pinus); Light Brown Apple Moth (Epiphyas postvittana); Melonworm (Diaphania hyalinata); Mimosa Webworm (Homadaula anisocentra); Obliquebanded Leafroller (Choristoneura rosaceana); Oleander Moth (Syntomeida epilais); Omnivorous Leafroller (Playnota stultana); Omnivorous Looper (Sabulodes aegrotata); Orangedog (Papilio cresphontes); Orange Tortrix (Argyrotaenia citrana); Oriental Fruit Moth (Grapholita molesta); Peach Twig Borer (Anarsia lineatella); Pine Butterfly (Neophasia menapia); Podworm (Heliocoverpa zea); Redbanded Leafroller (Argyrotaenia velutinana); Redhumped Caterpillar (Schizura concinna); Rindworm Complex (Various Leps.); Saddleback Caterpillar (Sibine stimulea); Saddle Prominent Caterpillar Heterocampa guttivitta); Saltmarsh Caterpillar (Estigmene acrea); Sod Webworm (Crambus spp.); Spanworm (Ennomos subsignaria); Fall Cankerworm (Alsophila pometaria); Spruce Budworm (Choristoneura fumiferana); Tent Caterpillar (Various Lasiocampidae); Thecla-Thecla basilides (Geyr) Thecla basilides); Tobacco Hornworm (Manduca sexta); Tobacco Moth (Ephestia elutella); Tufted Apple Budmoth (Platynota idaeusalis); Twig Borer (Anarsia lineatella); Variegated Cutworm (Peridroma saucia); Variegated Leafroller (Platynota flavedana); Velvetbean Caterpillar (Anticarsia gemmatalis); Walnut Caterpillar (Datana integerrima); Webworm (Hyphantria cunea); Western Tussock Moth (Orgyia vetusta); Southern Cornstalk Borer (Diatraea crambidoides); Corn Earworm; Sweet potato weevil; Pepper weevil; Citrus root weevil; Strawberry root weevil; Pecan weevil; Filbert weevil; Ricewater weevil; Alfalfa weevil; Clover weevil; Tea shot-hole borer; Root weevil; Sugarcane beetle; Coffee berry borer; Annual blue grass weevil (Listronotus maculicollis); Asiatic garden beetle (Maladera castanea); European chafer (Rhizotroqus majalis); Green June beetle (Cotinis nitida); Japanese beetle (Popillia japonica); May or June beetle (Phyllophaga sp.); Northern masked chafer (Cyclocephala borealis); Oriental beetle (Anomala orientalis); Southern masked chafer (Cyclocephala lurida); Billbug (Curculionoidea); Aedes aegypti; Busseola fusca; Chilo suppressalis; Culex pipiens; Culex quinquefasciatus; Diabrotica virgifera; Diatraea saccharalis; Helicoverpa armigera; Helicoverpa zea; Heliothis virescens; Leptinotarsa decemlineata; Ostrinia furnacalis; Ostrinia nubilalis; Pectinophora gossypiella; Plodia interpunctella; Plutella xylostella; Pseudoplusia includens; Spodoptera exigua; Spodoptera frugiperda; Spodoptera littoralis; Trichoplusia ni; and Xanthogaleruca luteola.

[1063] In some embodiments, the present invention provides a method to control Bacillus thuringiensis-toxin-resistant insects, said method comprising, providing a mixture of at least two types of peptides, wherein the first type of peptide is a PFIP, and the second type of peptide is a CRIP, wherein the PFIP is selected from one or any combination of the PFIPs described herein; and wherein the CRIP is selected from the one or any combination of the CRIPs described herein (e.g., an atracotoxin (ACTX), a ctenitoxin (CNTX), an Av2 toxin, an Av3 toxin, an Av3-Variant Polypeptide (AVP), or a combination thereof); wherein the PFIP is not fused to the CRIP; and then applying said mixture to the locus of an insect.

[1064] In some embodiments, the present invention provides a method to control Bacillus thuringiensis-toxin-resistant insects, wherein the Bacillus thuringiensis-toxin-resistant insects are selected from the group consisting of: Aedes aegypti; Busseola fusca; Chilo suppressalis; Culex pipiens; Culex quinquefasciatus; Diabrotica virgifera; Diatraea saccharalis; Helicoverpa armigera; Helicoverpa zea; Heliothis virescens; Leptinotarsa decemlineata; Ostrinia furnacalis; Ostrinia nubilalis; Pectinophora gossypiella; Plodia interpunctella; Plutella xylostella; Pseudoplusia includens; Spodoptera exigua; Spodoptera frugiperda; Spodoptera littoralis; Trichoplusia ni; and Xanthogaleruca luteola.

[1065] In some embodiments, the present invention provides a method of protecting a plant from insects comprising, providing a plant which expresses two or more polypeptides, wherein one type of polypeptide is a PFIP, or a polynucleotide encoding the same; and the other type of polypeptide is a CRIP, or polynucleotide encoding the same; and wherein the PFIP is not fused to the CRIP.

[1066] In some embodiments, the present invention provides a method of protecting a plant from insects, wherein the insects are selected from the group consisting of: Achema Sphinx Moth (Hornworm) (Eumorpha achemon); Alfalfa Caterpillar (Colias eurytheme); Almond Moth (Caudra cautella); Amorbia Moth (Amorbia humerosana); Armyworm (Spodoptera spp., e.g. exigua, frugiperda, littoralis, Pseudaletia unipuncta); Artichoke Plume Moth (Platyptilia carduidactyla); Azalea Caterpillar (Datana major); Bagworm (Thyridopteryx); ephemeraeformis); Banana Moth (Hypercompe scribonia); Banana Skipper (Erionota thrax); Blackheaded Budworm (Acleris gloverana); California Oakworm (Phryganidia californica); Spring Cankerworm (Paleacrita merriccata); Cherry Fruitworm (Grapholita packardi); China Mark Moth (Nymphula stagnata); Citrus Cutworm (Xylomyges curialis); Codling Moth (Cydia pomonella); Cranberry Fruitworm (Acrobasis vaccinii); Cross-striped Cabbageworm (Evergestis rimosalis); Cutworm (Noctuid species, Agrotis ipsilon); Douglas Fir Tussock Moth (Orgyia pseudotsugata); Ello Moth (Hornworm) (Erinnyis ello); Elm Spanworm (Ennomos subsignaria); European Grapevine Moth (Lobesia botrana); European Skipper (Thymelicus lineola (Essex Skipper); Fall Webworm (Melissopus latiferreanus; Filbert Leafroller (Archips rosanus; Fruittree Leafroller (Archips argyrospilia; Grape Berry Moth (Paralobesia viteana; Grape Leafroller (Platynota stultana; Grapeleaf Skeletonizer (Harrisina americana (ground only); Green Cloverworm (Plathypena scabra; Greenstriped Mapleworm (Dryocampa rubicunda; Gummosos-Batrachedra; Comosae (Hodges); Gypsy Moth (Lymantria dispar); Hemlock Looper (Lambdina fiscellaria); Hornworm (Manduca spp.); Imported Cabbageworm (Pieris rapae); io Moth (Automeris io); Jack Pine Budworm (Choristoneura pinus); Light Brown Apple Moth (Epiphyas postvittana); Melonworm (Diaphania hyalinata); Mimosa Webworm (Homadaula anisocentra); Obliquebanded Leafroller (Choristoneura rosaceana); Oleander Moth (Syntomeida epilais); Omnivorous Leafroller (Playnota stultana); Omnivorous Looper (Sabulodes aegrotata); Orangedog (Papilio cresphontes); Orange Tortrix (Argyrotaenia citrana); Oriental Fruit Moth (Grapholita molesta); Peach Twig Borer (Anarsia lineatella); Pine Butterfly (Neophasia menapia); Podworm (Heliocoverpa zea); Redbanded Leafroller (Argyrotaenia velutinana); Redhumped Caterpillar (Schizura concinna); Rindworm Complex (Various Leps.); Saddleback Caterpillar (Sibine stimulea); Saddle Prominent Caterpillar Heterocampa guttivitta); Saltmarsh Caterpillar (Estigmene acrea); Sod Webworm (Crambus spp.); Spanworm (Ennomos subsignaria); Fall Cankerworm (Alsophila pometaria); Spruce Budworm (Choristoneura fumiferana); Tent Caterpillar (Various Lasiocampidae); Thecla-Thecla basilides (Geyr) Thecla basilides); Tobacco Hornworm (Manduca sexta); Tobacco Moth (Ephestia elutella); Tufted Apple Budmoth (Platynota idaeusalis); Twig Borer (Anarsia lineatella); Variegated Cutworm (Peridroma saucia); Variegated Leafroller (Platynota flavedana); Velvetbean Caterpillar (Anticarsia gemmatalis); Walnut Caterpillar (Datana integerrima); Webworm (Hyphantria cunea); Western Tussock Moth (Orgyia vetusta); Southern Cornstalk Borer (Diatraea crambidoides); Corn Earworm; Sweet potato weevil; Pepper weevil; Citrus root weevil; Strawberry root weevil; Pecan weevil; Filbert weevil; Ricewater weevil; Alfalfa weevil; Clover weevil; Tea shot-hole borer; Root weevil; Sugarcane beetle; Coffee berry borer; Annual blue grass weevil (Listronotus maculicollis); Asiatic garden beetle (Maladera castanea); European chafer (Rhizotroqus majalis); Green June beetle (Cotinis nitida); Japanese beetle (Popillia japonica); May or June beetle (Phyllophaga sp.); Northern masked chafer (Cyclocephala borealis); Oriental beetle (Anomala orientalis); Southern masked chafer (Cyclocephala lurida); Billbug (Curculionoidea); Aedes aegypti; Busseola fusca; Chilo suppressalis; Culex pipiens; Culex quinquefasciatus; Diabrotica virgifera; Diatraea saccharalis; Helicoverpa armigera; Helicoverpa zea; Heliothis virescens; Leptinotarsa decemlineata; Ostrinia furnacalis; Ostrinia nubilalis; Pectinophora gossypiella; Plodia interpunctella; Plutella xylostella; Pseudoplusia includens; Spodoptera exigua; Spodoptera frugiperda; Spodoptera littoralis; Trichoplusia ni; and Xanthogaleruca luteola.

[1067] In some embodiments, the present invention provides a method of protecting a plant from a Bacillus thuringiensis-toxin-resistant insect comprising, providing a plant which expresses two or more polypeptides, wherein one type of polypeptide is a PFIP, or a polynucleotide encoding the same; and the other type of polypeptide is a CRIP, or polynucleotide encoding the same; and wherein the PFIP is not fused to the CRIP.

[1068] In some embodiments, the present invention provides a method of protecting a plant from a Bacillus thuringiensis-toxin-resistant insect, wherein the plant expresses a mixture consisting of a PFIP, or a polynucleotide encoding the same; and a CRIP or a polynucleotide encoding the same.

[1069] In some embodiments, the present invention provides a method of protecting a plant from a Bacillus thuringiensis-toxin-resistant insect, wherein the Bacillus thuringiensis-toxin-resistant insects are selected from the group consisting of: Aedes aegypti; Busseola fusca; Chilo suppressalis; Culex pipiens; Culex quinquefasciatus; Diabrotica virgifera; Diatraea saccharalis; Helicoverpa armigera; Helicoverpa zea; Heliothis virescens; Leptinotarsa decemlineata; Ostrinia furnacalis; Ostrinia nubilalis; Pectinophora gossypiella; Plodia interpunctella; Plutella xylostella; Pseudoplusia includens; Spodoptera exigua; Spodoptera frugiperda; Spodoptera littoralis; Trichoplusia ni; and Xanthogaleruca luteola.

[1070] In some embodiments, the present invention provides a method for controlling insects comprising, providing to said insect a transgenic plant that comprises in its genome a stably incorporated nucleic acid construct, wherein said stably incorporated nucleic acid construct comprises a first polynucleotide operable to encode a PFIP, and a second polynucleotide operable to encode a CRIP, and wherein the PFIP when combined with the CRIP produces a insecticidal effect.

[1071] In some embodiments, the present invention provides a method of combating, controlling, or inhibiting a pest comprising, applying a pesticidally effective amount of any one of the mixtures described herein (e.g., a mixture comprising one or more PFIPs and one or more CRIPs) to the locus of the pest, or to a plant or animal susceptible to an attack by the pest.

[1072] In some embodiments, the present invention provides a method of combating, controlling, or inhibiting a pest, wherein the pest is selected from the group consisting of: Achema Sphinx Moth (Hornworm) (Eumorpha achemon); Alfalfa Caterpillar (Colias eurytheme); Almond Moth (Caudra cautella); Amorbia Moth (Amorbia humerosana); Armyworm (Spodoptera spp., e.g. exigua, frugiperda, littoralis, Pseudaletia unipuncta); Artichoke Plume Moth (Platyptilia carduidactyla); Azalea Caterpillar (Datana major); Bagworm (Thyridopteryx); ephemeraeformis); Banana Moth (Hypercompe scribonia); Banana Skipper (Erionota thrax); Blackheaded Budworm (Acleris gloverana); California Oakworm (Phryganidia californica); Spring Cankerworm (Paleacrita merriccata); Cherry Fruitworm (Grapholita packardi); China Mark Moth (Nymphula stagnata); Citrus Cutworm (Xylomyges curialis); Codling Moth (Cydia pomonella); Cranberry Fruitworm (Acrobasis vaccinii); Cross-striped Cabbageworm (Evergestis rimosalis); Cutworm (Noctuid species, Agrotis ipsilon); Douglas Fir Tussock Moth (Orgyia pseudotsugata); Ello Moth (Hornworm) (Erinnyis ello); Elm Spanworm (Ennomos subsignaria); European Grapevine Moth (Lobesia botrana); European Skipper (Thymelicus lineola (Essex Skipper); Fall Webworm (Melissopus latiferreanus; Filbert Leafroller (Archips rosanus; Fruittree Leafroller (Archips argyrospilia; Grape Berry Moth (Paralobesia viteana; Grape Leafroller (Platynota stultana; Grapeleaf Skeletonizer (Harrisina americana (ground only); Green Cloverworm (Plathypena scabra; Greenstriped Mapleworm (Dryocampa rubicunda; Gummosos-Batrachedra; Comosae (Hodges); Gypsy Moth (Lymantria dispar); Hemlock Looper (Lambdina fiscellaria); Hornworm (Manduca spp.); Imported Cabbageworm (Pieris rapae); io Moth (Automeris io); Jack Pine Budworm (Choristoneura pinus); Light Brown Apple Moth (Epiphyas postvittana); Melonworm (Diaphania hyalinata); Mimosa Webworm (Homadaula anisocentra); Obliquebanded Leafroller (Choristoneura rosaceana); Oleander Moth (Syntomeida epilais); Omnivorous Leafroller (Playnota stultana); Omnivorous Looper (Sabulodes aegrotata); Orangedog (Papilio cresphontes); Orange Tortrix (Argyrotaenia citrana); Oriental Fruit Moth (Grapholita molesta); Peach Twig Borer (Anarsia lineatella); Pine Butterfly (Neophasia menapia); Podworm (Heliocoverpa zea); Redbanded Leafroller (Argyrotaenia velutinana); Redhumped Caterpillar (Schizura concinna); Rindworm Complex (Various Leps.); Saddleback Caterpillar (Sibine stimulea); Saddle Prominent Caterpillar Heterocampa guttivitta); Saltmarsh Caterpillar (Estigmene acrea); Sod Webworm (Crambus spp.); Spanworm (Ennomos subsignaria); Fall Cankerworm (Alsophila pometaria); Spruce Budworm (Choristoneura fumiferana); Tent Caterpillar (Various Lasiocampidae); Thecla-Thecla basilides (Geyr) Thecla basilides); Tobacco Hornworm (Manduca sexta); Tobacco Moth (Ephestia elutella); Tufted Apple Budmoth (Platynota idaeusalis); Twig Borer (Anarsia lineatella); Variegated Cutworm (Peridroma saucia); Variegated Leafroller (Platynota flavedana); Velvetbean Caterpillar (Anticarsia gemmatalis); Walnut Caterpillar (Datana integerrima); Webworm (Hyphantria cunea); Western Tussock Moth (Orgyia vetusta); Southern Cornstalk Borer (Diatraea crambidoides); Corn Earworm; Sweet potato weevil; Pepper weevil; Citrus root weevil; Strawberry root weevil; Pecan weevil; Filbert weevil; Ricewater weevil; Alfalfa weevil; Clover weevil; Tea shot-hole borer; Root weevil; Sugarcane beetle; Coffee berry borer; Annual blue grass weevil (Listronotus maculicollis); Asiatic garden beetle (Maladera castanea); European chafer (Rhizotroqus majalis); Green June beetle (Cotinis nitida); Japanese beetle (Popillia japonica); May or June beetle (Phyllophaga sp.); Northern masked chafer (Cyclocephala borealis); Oriental beetle (Anomala orientalis); Southern masked chafer (Cyclocephala lurida); Billbug (Curculionoidea); Aedes aegypti; Busseola fusca; Chilo suppressalis; Culex pipiens; Culex quinquefasciatus; Diabrotica virgifera; Diatraea saccharalis; Helicoverpa armigera; Helicoverpa zea; Heliothis virescens; Leptinotarsa decemlineata; Ostrinia furnacalis; Ostrinia nubilalis; Pectinophora gossypiella; Plodia interpunctella; Plutella xylostella; Pseudoplusia includens; Spodoptera exigua; Spodoptera frugiperda; Spodoptera littoralis; Trichoplusia ni; and Xanthogaleruca luteola.

[1073] In some embodiments, the present invention provides a method of combating, controlling, or inhibiting a pest, wherein the pest is selected from the group consisting of: Aedes aegypti; Busseola fusca; Chilo suppressalis; Culex pipiens; Culex quinquefasciatus; Diabrotica virgifera; Diatraea saccharalis; Helicoverpa armigera; Helicoverpa zea; Heliothis virescens, Leptinotarsa decemlineata; Ostrinia furnacalis; Ostrinia nubilalis; Pectinophora gossypiella; Plodia interpunctella; Plutella xylostella; Pseudoplusia includens; Spodoptera exigua; Spodoptera frugiperda; Spodoptera littoralis; Trichoplusia ni; and Xanthogaleruca luteola.

[1074] In some embodiments, the present invention provides a method of combating, controlling, or inhibiting a pest comprising, applying a pesticidally effective amount of the mixture of the present invention to the locus of the pest, or to a plant or animal susceptible to an attack by the pest; wherein the mixture of each insecticidal peptide results in an insecticidal effect.

[1075] In some embodiments, the present invention provides a method of combating, controlling, or inhibiting a pest, wherein the pest is selected from the group consisting of: Achema Sphinx Moth (Hornworm) (Eumorpha achemon); Alfalfa Caterpillar (Colias eurytheme); Almond Moth (Caudra cautella); Amorbia Moth (Amorbia humerosana); Armyworm (Spodoptera spp., e.g. exigua, frugiperda, littoralis, Pseudaletia unipuncta); Artichoke Plume Moth (Platyptilia carduidactyla); Azalea Caterpillar (Datana major); Bagworm (Thyridopteryx); ephemeraeformis); Banana Moth (Hypercompe scribonia); Banana Skipper (Erionota thrax); Blackheaded Budworm (Acleris gloverana); California Oakworm (Phryganidia californica); Spring Cankerworm (Paleacrita merriccata); Cherry Fruitworm (Grapholita packardi); China Mark Moth (Nymphula stagnata); Citrus Cutworm (Xylomyges curialis); Codling Moth (Cydiapomonella); Cranberry Fruitworm (Acrobasis vaccinii); Cross-striped Cabbageworm (Evergestis rimosalis); Cutworm (Noctuid species, Agrotis ipsilon); Douglas Fir Tussock Moth (Orgyia pseudotsugata); Ello Moth (Hornworm) (Erinnyis ello); Elm Spanworm (Ennomos subsignaria); European Grapevine Moth (Lobesia botrana); European Skipper (Thymelicus lineola (Essex Skipper); Fall Webworm (Melissopus latiferreanus; Filbert Leafroller (Archips rosanus; Fruittree Leafroller (Archips argyrospilia; Grape Berry Moth (Paralobesia viteana; Grape Leafroller (Platynota stultana; Grapeleaf Skeletonizer (Harrisina americana (ground only); Green Cloverworm (Plathypena scabra; Greenstriped Mapleworm (Dryocampa rubicunda; Gummosos-Batrachedra; Comosae (Hodges); Gypsy Moth (Lymantria dispar); Hemlock Looper (Lambdina fiscellaria); Hornworm (Manduca spp.); Imported Cabbageworm (Pieris rapae); io Moth (Automeris io); Jack Pine Budworm (Choristoneura pinus); Light Brown Apple Moth (Epiphyas postvittana); Melonworm (Diaphania hyalinata); Mimosa Webworm (Homadaula anisocentra); Obliquebanded Leafroller (Choristoneura rosaceana); Oleander Moth (Syntomeida epilais); Omnivorous Leafroller (Playnota stultana); Omnivorous Looper (Sabulodes aegrotata); Orangedog (Papilio cresphontes); Orange Tortrix (Argyrotaenia citrana); Oriental Fruit Moth (Grapholita molesta); Peach Twig Borer (Anarsia lineatella); Pine Butterfly (Neophasia menapia); Podworm (Heliocoverpa zea); Redbanded Leafroller (Argyrotaenia velutinana); Redhumped Caterpillar (Schizura concinna); Rindworm Complex (Various Leps.); Saddleback Caterpillar (Sibine stimulea); Saddle Prominent Caterpillar Heterocampa guttivitta); Saltmarsh Caterpillar (Estigmene acrea); Sod Webworm (Crambus spp.); Spanworm (Ennomos subsignaria); Fall Cankerworm (Alsophila pometaria); Spruce Budworm (Choristoneura fumiferana); Tent Caterpillar (Various Lasiocampidae); Thecla-Thecla basilides (Geyr) Thecla basilides); Tobacco Hornworm (Manduca sexta); Tobacco Moth (Ephestia elutella); Tufted Apple Budmoth (Platynota idaeusalis); Twig Borer (Anarsia lineatella); Variegated Cutworm (Peridroma saucia); Variegated Leafroller (Platynota flavedana); Velvetbean Caterpillar (Anticarsia gemmatalis); Walnut Caterpillar (Datana integerrima); Webworm (Hyphantria cunea); Western Tussock Moth (Orgyia vetusta); Southern Cornstalk Borer (Diatraea crambidoides); Corn Earworm; Sweet potato weevil; Pepper weevil; Citrus root weevil; Strawberry root weevil; Pecan weevil; Filbert weevil; Ricewater weevil; Alfalfa weevil; Clover weevil; Tea shot-hole borer; Root weevil; Sugarcane beetle; Coffee berry borer; Annual blue grass weevil (Listronotus maculicollis); Asiatic garden beetle (Maladera castanea); European chafer (Rhizotroqus majalis); Green June beetle (Cotinis nitida); Japanese beetle (Popillia japonica); May or June beetle (Phyllophaga sp.); Northern masked chafer (Cyclocephala borealis); Oriental beetle (Anomala orientalis); Southern masked chafer (Cyclocephala lurida); Billbug (Curculionoidea); Aedes aegypti; Busseola fusca; Chilo suppressalis; Culex pipiens; Culex quinquefasciatus; Diabrotica virgifera; Diatraea saccharalis; Helicoverpa armigera; Helicoverpa zea; Heliothis virescens; Leptinotarsa decemlineata; Ostrinia furnacalis; Ostrinia nubilalis; Pectinophora gossypiella; Plodia interpunctella; Plutella xylostella; Pseudoplusia includens; Spodoptera exigua; Spodoptera frugiperda; Spodoptera littoralis; Trichoplusia ni; and Xanthogaleruca luteola.

[1076] In some embodiments, the present invention provides a method of combating, controlling, or inhibiting a pest, wherein the pest is selected from the group consisting of: Aedes aegypti; Busseola fusca; Chilo suppressalis; Culex pipiens; Culex quinquefasciatus; Diabrotica virgifera; Diatraea saccharalis; Helicoverpa armigera; Helicoverpa zea; Heliothis virescens, Leptinotarsa decemlineata; Ostrinia furnacalis; Ostrinia nubilalis; Pectinophora gossypiella; Plodia interpunctella; Plutella xylostella; Pseudoplusia includens; Spodoptera exigua; Spodoptera frugiperda; Spodoptera littoralis; Trichoplusia ni; and Xanthogaleruca luteola.

[1077] Mixtures and Products Utilizing the Composition

[1078] Any of the mixtures, products, polypeptides and/or plants utilizing the composition of the present invention, i.e., one or more PFIPs and one or more CRIPs, and described herein, can be used to control pests, their growth, and/or the damage caused by their actions, especially their damage to plants and animals (e.g., chickens). Compositions comprising one or more PFIPs and one or more CRIPs, for example, agrochemical compositions, can include, but is not limited to, aerosols and/or aerosolized products, for example, sprays, fumigants, powders, dusts, and/or gases; seed dressings; oral preparations (e.g., insect food, etc.); transgenic organisms expressing and/or one or more PFIPs and one or more CRIPs (either transiently and/or stably), for example, a plant or an animal.

[1079] In some embodiments, compositions comprising a one or more PFIPs and one or more CRIPs and one or more non-CRIP or non-PFIP peptides, polypeptides, proteins, or agents can be used concomitantly, or sequentially with other insecticides proteins, and/or pesticides, e.g., AaIT1, permethrin, and other known insecticides.

[1080] In some embodiments, the active ingredients of the present disclosure can be applied in the form of compositions and can be applied to the crop area or plant to be treated, simultaneously or in succession, with other compounds. These compounds can be fertilizers, weed killers, cryoprotectants, surfactants, detergents, pesticidal soaps, dormant oils, polymers, and/or time-release or biodegradable carrier formulations that permit long-term dosing of a target area following a single application of the formulation. They can also be selective herbicides, chemical insecticides, virucides, microbicides, amoebicides, pesticides, fungicides, bacteriocides, nematocides, molluscicides or mixtures of several of these preparations, if desired, together with further agriculturally acceptable carriers, surfactants or application-promoting adjuvants customarily employed in the art of formulation. Suitable carriers and adjuvants can be solid or liquid and correspond to the substances ordinarily employed in formulation technology, e.g. natural or regenerated mineral substances, solvents, dispersants, wetting agents, tackifiers, binders or fertilizers. Likewise, the formulations may be prepared into edible “baits” or fashioned into pest “traps” to permit feeding or ingestion by a target pest of the pesticidal formulation.

[1081] Methods of applying an active ingredient of the present disclosure or an agrochemical composition of the present disclosure that contains at least one of the PFIPs and at least one of the CRIPs produced by the methods described herein of the present disclosure include leaf application, seed coating and soil application. In some embodiments, the number of applications and the rate of application depend on the intensity of infestation by the corresponding pest.

[1082] The composition may be formulated as a powder, dust, pellet, granule, spray, emulsion, colloid, solution, or such like, and may be prepared by such conventional means as desiccation, lyophilization, homogenization, extraction, filtration, centrifugation, sedimentation, or concentration of a culture of cells comprising the polypeptide. In all such compositions that contain at least one such pesticidal polypeptide, the polypeptide may be present in a concentration of from about 1% to about 99% by weight.

[1083] In some embodiments, compositions containing one or more PFIPs and one or more CRIPs may be prophylactically applied to an environmental area to prevent infestation by a susceptible pest, for example, a lepidopteran and/or coleopteran pest, which may be killed or reduced in numbers in a given area by the methods of the invention. In some embodiments, the pest ingests, or comes into contact with, a pesticidally-effective amount of the polypeptide.

[1084] In some embodiments, the pesticide compositions described herein may be made by formulating either the bacterial, yeast, or other cell, crystal and/or spore suspension, or isolated protein component with the desired agriculturally-acceptable carrier. The compositions may be formulated prior to administration in an appropriate means such as lyophilized, freeze-dried, desiccated, or in an aqueous carrier, medium or suitable diluent, such as saline and/or other buffer. In some embodiments, the formulated compositions may be in the form of a dust or granular material, or a suspension in oil (vegetable or mineral), or water or oil/water emulsions, or as a wettable powder, or in combination with any other carrier material suitable for agricultural application. Suitable agricultural carriers can be solid or liquid and are well known in the art. In some embodiments, the formulations may be mixed with one or more solid or liquid adjuvants and prepared by various means, e.g., by homogeneously mixing, blending and/or grinding the pesticidal composition with suitable adjuvants using conventional formulation techniques. Suitable formulations and application methods are described in U.S. Pat. No. 6,468,523, herein incorporated by reference in its entirety.

[1085] Ratios, Mixtures, Compositions, and Additional Products

[1086] In some embodiments, a composition comprising one or more PFIPs and one or more CRIPs may also comprise additional ingredients, for example, herbicides, chemical insecticides, virucides, microbicides, amoebicides, pesticides, fungicides, bacteriocides, nematocides, molluscicides, polypeptides, and/or one or more of the foregoing mixtures thereof.

[1087] Novel formulations comprising a mixture of the present invention can be used to control, kill and/or inhibit pests such as insects. In some embodiments, the method of controlling an insect comprises: applying a PFIP, e.g., a Bt (Bacillus thuringiensis) protein, to an insect; and applying a CRIP to said insect. The foregoing application can be applied concomitantly and/or sequentially, and either in the same or separate mixtures.

[1088] In some embodiments, the Bt protein and the CRIP may be applied to Bt-resistant insects. The ratio of PFIP to CRIP, on a dry weight basis, can be selected from at least about the following ratios: 10,000:1, 5,000:1, 1,000:1, 500:1, 250:1, 200:1, 100:1, 99:1, 95:5, 90:10, 85:15, 80:20, 75:25, 70:30, 65:35, 60:40, 55:45, 1:1, 45:55, 40:60, 35:65, 30:70, 25:75, 20:80, 15:85, 10:90, 5:95, 1:99, 1:100, 1:200, 1:250, 1:500, 1:1,000, 1:5,000, or 1:10,000, or any combination of any two of these values. In some embodiments, the total concentration of PFIP and CRIP in the mixture is selected from the following percent concentrations: 0, 1, 5, 10, 15, 20, 25, 30, 35, 40, 45, 50, 55, 60, 65, 70, 75, 80, 85, 90, 95, 99 or 100%, or any range between any two of these values, and the remaining percentage of the mixture is comprised of excipients.

[1089] In some embodiments, a mixture of the present invention can be included in a formulation, for example, a formulation composed of a polar aprotic solvent, and or water, and or where the polar aprotic solvent is present in an amount of 1-99 wt %, the polar protic solvent is present in an amount of 1-99 wt %, and the water is present in an amount of 0-98 wt %. The polar aprotic solvent formulations are especially effective when they contain MSO. MSO is a methylated seed oil and surfactant blend that uses methyl esters of soya oil in amounts of between about 80 and 85 percent petroleum oil with 15 to 20 percent surfactant.

[1090] In some embodiments, the formulations include a PFIP, a CRIP, and another insecticidal polypeptide.

[1091] In some embodiments, the insecticidal polypeptide can be obtained from a commercially available product comprising an insecticidal peptide. For example in some embodiments, the commercially available product can be DIPEL® available from VALENT BIOSCIENCES®.

[1092] In some embodiments, a mixture can comprise one or more PFIPs and one or more CRIPs, wherein the PFIP is a Bt, and wherein the one or more CRIPs is one or more of an atracotoxin (ACTX), a ctenitoxin (CNTX), an Av2 toxin, an Av3 toxin, an Av3-Variant Polypeptide (AVP), or a combination thereof. The mixture can be in the ratio of PFIP to CRIP, on a dry weight basis, from about any or all of the following ratios: 99:1, 95:5, 90:10, 85:15, 80:20, 75:25, 70:30, 65:35, 60:40, 55:45, 50:50, 45:55, 40:60, 35:65, 30:70, 25:75, 20:80, 15:85, 10:90, 5:95 and 1:99, or any combination of any two of these values. In some embodiments, the mixture can have a ratio of PFIP to CRIP, on a on a dry weight basis, selected from about the following ratios: 0:50, 45:55, 40:60, 35:65, 30:70, 25:75, 20:80, 15:85, 10:90, 5:95, 1:99, 0.5:99.5, 0.1:99.9 and 0.01:99.99 or any combination of any two of these values.

[1093] In some embodiments, the mixture of the present invention can be combined with permethrin. Permethrin is an insecticide that is commercially available (e.g., NIX®) and known to those having ordinary skill in the art. In some embodiments, the method of controlling an insect comprises: applying permethrin to an insect; and applying a mixture comprising one or more PFIPs and one or more CRIPS to said insect. The foregoing application can be applied concomitantly and/or sequentially, and either in the same or separate mixtures. In some embodiments, permethrin and the mixture comprising one or more PFIPs and one or more CRIPS may be applied to (permethrin)-resistant insects. In some embodiments, permethrin and the mixture comprising one or more PFIPs and one or more CRIPS may be applied to (Bt toxin)-resistant insects. The ratio of permethrin to a mixture comprising one or more PFIPs and one or more CRIPS, on a dry weight basis, can be selected from at least about the following ratios: 10,000:1, 5,000:1, 1,000:1, 500:1, 250:1, 200:1, 100:1, 99:1, 95:5, 90:10, 85:15, 80:20, 75:25, 70:30, 65:35, 60:40, 55:45, 1:1, 45:55, 40:60, 35:65, 30:70, 25:75, 20:80, 15:85, 10:90, 5:95, 1:99, 1:100, 1:200, 1:250, 1:500, 1:1,000, 1:5,000, or 1:10,000, or any combination of any two of these values. The total concentration of permethrin and a mixture comprising one or more PFIPs and one or more CRIPS in the combination is selected from the following percent concentrations: 0, 1, 5, 10, 15, 20, 25, 30, 35, 40, 45, 50, 55, 60, 65, 70, 75, 80, 85, 90, 95, 99 or 100%, or any range between any two of these values, and the remaining percentage of the mixture is comprised of excipients.

[1094] In some embodiments, the mixture comprises both a permethrin and a mixture comprising one or more PFIPs and one or more CRIPS. The mixture can be in the ratio of permethrin to a mixture comprising one or more PFIPs and one or more CRIPS, on a dry weight basis, from about any or all of the following ratios: 10,000:1, 5,000:1, 1,000:1, 500:1, 250:1, 200:1, 100:1, 99:1, 95:5, 90:10, 85:15, 80:20, 75:25, 70:30, 65:35, 60:40, 55:45, 1:1, 45:55, 40:60, 35:65, 30:70, 25:75, 20:80, 15:85, 10:90, 5:95, 1:99, 1:100, 1:200, 1:250, 1:500, 1:1,000, 1:5,000, or 1:10,000, or any combination of any two of these values. In some embodiments, the mixture can have a ratio of permethrin to a mixture comprising one or more PFIPs and one or more CRIPS, on a on a dry weight basis, selected from about the following ratios: 0:50, 45:55, 40:60, 35:65, 30:70, 25:75, 20:80, 15:85, 10:90, 5:95, 1:99, 0.5:99.5, 0.1:99.9 and 0.01:99.99 or any combination of any two of these values.

[1095] In some embodiments, a mixture of the present invention comprises one or more PFIPs and one or more CRIPs, wherein the CRIP is one or more polypeptides derived from a sea anemone. For example, in some embodiments, the sea anemone can be Actinia equina; Anemonia erythraea; Anemonia sulcata; Anemonia viridis; Anthopleura elegantissima; Anthopleura fuscoviridis; Anthopleura xanthogrammica; Bunodosoma caissarum; Bunodosoma cangicum; Bunodosoma granulifera; Heteractis crispa; Parasicyonis actinostoloides; Radianthus paumotensis; or Stoichactis helianthus. In yet other embodiments, the sea anemone toxin can be Av2; an Av3; or a variant thereof.

[1096] In some embodiments, a mixture of the present invention comprises one or more PFIPs and one or more CRIPs, wherein the one or more CRIPs is one or more polypeptides derived from the sea anemone, Anemonia viridis, which possesses a variety of toxins that it uses to defend itself. One of the toxins derived from Anemonia viridis is the neurotoxin “Av3.” Av3 is a type III sea anemone toxin that inhibits the inactivation of voltage-gated sodium (Na⁺) channels at receptor site 3, resulting in contractile paralysis. The binding of an Av3 toxin to site 3 results in the inactivated state of the sodium channel to become destabilized, which in turn causes the channel to remain in the open position (see Blumenthal et al., Voltage-gated sodium channel toxins: poisons, probes, and future promise. Cell Biochem Biophys. 2003; 38(2):215-38). Av3 shows high selectivity for crustacean and insect sodium channels, and low selectivity for mammalian sodium channels (see Moran et al., Sea anemone toxins affecting voltage-gated sodium channels—molecular and evolutionary features, Toxicon. 2009 Dec. 15; 54(8): 1089-1101). An exemplary Av3 polypeptide from Anemonia viridis is provided having the amino acid sequence of SEQ ID NO: 1780. The ratio of AVP to PFIP, on a dry weight basis, can be selected from at least about the following ratios: 10,000:1, 5,000:1, 1,000:1, 500:1, 250:1, 200:1, 100:1, 99:1, 95:5, 90:10, 85:15, 80:20, 75:25, 70:30, 65:35, 60:40, 55:45, 1:1, 45:55, 40:60, 35:65, 30:70, 25:75, 20:80, 15:85, 10:90, 5:95, 1:99, 1:100, 1:200, 1:250, 1:500, 1:1,000, 1:5,000, or 1:10,000, or any combination of any two of these values. The total concentration of AVP and PFIP in the mixture is selected from the following percent concentrations: 0, 1, 5, 10, 15, 20, 25, 30, 35, 40, 45, 50, 55, 60, 65, 70, 75, 80, 85, 90, 95, 99 or 100%, or any range between any two of these values, and the remaining percentage of the mixture is comprised of excipients.

[1097] In some embodiments, a mixture of the present invention comprises one or more PFIPs and one or more CRIPs, wherein the one or more CRIPs is one or more polypeptides derived from the sea anemone Av3, for example, one or more of the Av3 variant polypeptides (AVPs) can have the following amino acid variation from SEQ ID NO: 1780: an N-terminal amino acid substitution of R1K relative to SEQ ID NO: 1780, changing the polypeptide sequence from the wild-type “RSCCPCYWGGCPWGQNCYPEGCSGPKV” to “KSCCPCYWGGCPWGQNCYPEGCSGPKV” (SEQ ID NO: 1781); and/or an N-terminal mutation and a C-terminal mutation, wherein the N-terminal amino acid can have a substitution of R1K relative to SEQ ID NO: 1780 and the C-terminal amino acid can be deleted relative to SEQ ID NO: 1780 changing the polypeptide sequence from the wild-type “RSCCPCYWGGCPWGQNCYPEGCSGPKV” to “KSCCPCYWGGCPWGQNCYPEGCSGPK” (SEQ ID NO: 1782). The ratio of AVP to PFIP, on a dry weight basis, can be selected from at least about the following ratios: 10,000:1, 5,000:1, 1,000:1, 500:1, 250:1, 200:1, 100:1, 99:1, 95:5, 90:10, 85:15, 80:20, 75:25, 70:30, 65:35, 60:40, 55:45, 1:1, 45:55, 40:60, 35:65, 30:70, 25:75, 20:80, 15:85, 10:90, 5:95, 1:99, 1:100, 1:200, 1:250, 1:500, 1:1,000, 1:5,000, or 1:10,000, or any combination of any two of these values. The total concentration of AVP and PFIP in the mixture is selected from the following percent concentrations: 0, 1, 5, 10, 15, 20, 25, 30, 35, 40, 45, 50, 55, 60, 65, 70, 75, 80, 85, 90, 95, 99 or 100%, or any range between any two of these values, and the remaining percentage of the mixture is comprised of excipients.

[1098] In some embodiments, a mixture of the present invention comprises one or more PFIPs and one or more CRIPs, wherein the one or more CRIPs is one or more polypeptides derived and/or originating from Hadronyche versuta, or the Blue Mountain funnel web spider, Atrax robustus, Atrax formidabilis, or Atrax infensus, including toxins known as ACTX peptides.

[1099] In some embodiments, a mixture of the present invention comprises one or more PFIPs and one or more CRIPs, wherein the one or more CRIPs is one or more of the following ACTX peptides: U-ACTX-Hv1a, U+2-ACTX-Hv1a, rU-ACTX-Hv1a, rU-ACTX-Hv1b, rκ-ACTX-Hv1c, ω-ACTX-Hv1a, and/or ω-ACTX-Hv1a+2.

[1100] For example, in some embodiments, the mixture comprises one or more PFIPs and one or more CRIPs, wherein the one or more CRIPs is one or more U-ACTX peptides, Omega-ACTX peptides, and/or Kappa-ACTX peptides. The ratio of ACTX peptides to PFIP, on a dry weight basis, can be selected from at least about the following ratios: 10,000:1, 5,000:1, 1,000:1, 500:1, 250:1, 200:1, 100:1, 99:1, 95:5, 90:10, 85:15, 80:20, 75:25, 70:30, 65:35, 60:40, 55:45, 1:1, 45:55, 40:60, 35:65, 30:70, 25:75, 20:80, 15:85, 10:90, 5:95, 1:99, 1:100, 1:200, 1:250, 1:500, 1:1,000, 1:5,000, or 1:10,000, or any combination of any two of these values. The total concentration of ACTX and PFIP in the mixture is selected from the following percent concentrations: 0, 1, 5, 10, 15, 20, 25, 30, 35, 40, 45, 50, 55, 60, 65, 70, 75, 80, 85, 90, 95, 99 or 100%, or any range between any two of these values, and the remaining percentage of the mixture is comprised of excipients.

[1101] For example, in some embodiments, the mixture comprises one or more PFIPs and one or more CRIPs, wherein the one or more CRIPs is one or more Γ-CNTX-Pn1a toxins. The Γ-CNTX-Pn1a peptide is an insecticidal neurotoxin derived from the Brazilian armed spider, Phoneutria nigriventer. Γ-CNTX-Pn1a targets the N-methyl-D-aspartate (NMDA)-subtype of ionotropic glutamate receptor (GRIN), and sodium channels. An exemplary γ-CNTX-Pn1a peptide has an amino acid sequence of

(SEQ ID NO: 1778)
GSCADINGACKSDCDCCGDSVTCDCYWSDSCKCRESNFKIGMAIRKKFC.

[1102] In some embodiments, the method of controlling an insect comprises: applying Γ-CNTX-Pn1a to an insect; and applying one or more PFIPs and one or more CRIPS to said insect. The foregoing application can be applied concomitantly and/or sequentially, and either in the same or separate mixtures. In some embodiments, Γ-CNTX-Pn1a and the one or more PFIPs and one or more CRIPs may be applied to (Γ-CNTX-Pn1a)-resistant insects. In some embodiments, Γ-CNTX-Pn1a and the one or more PFIPs and one or more CRIPs may be applied to (Bt toxin)-resistant insects. The ratio of Γ-CNTX-Pn1a to one or more PFIPs, on a dry weight basis, can be selected from at least about the following ratios: 10,000:1, 5,000:1, 1,000:1, 500:1, 250:1, 200:1, 100:1, 99:1, 95:5, 90:10, 85:15, 80:20, 75:25, 70:30, 65:35, 60:40, 55:45, 1:1, 45:55, 40:60, 35:65, 30:70, 25:75, 20:80, 15:85, 10:90, 5:95, 1:99, 1:100, 1:200, 1:250, 1:500, 1:1,000, 1:5,000, or 1:10,000, or any combination of any two of these values. The total concentration of Γ-CNTX-Pn1a and PFIP in the mixture is selected from the following percent concentrations: 0, 1, 5, 10, 15, 20, 25, 30, 35, 40, 45, 50, 55, 60, 65, 70, 75, 80, 85, 90, 95, 99 or 100%, or any range between any two of these values, and the remaining percentage of the mixture is comprised of excipients.

[1103] In some embodiments, the mixture comprises both one or more Γ-CNTX-Pn1a peptides and one or more PFIPs. The mixture can be in the ratio of Γ-CNTX-Pn1a to one or more PFIPs, on a dry weight basis, from about any or all of the following ratios: 10,000:1, 5,000:1, 1,000:1, 500:1, 250:1, 200:1, 100:1, 99:1, 95:5, 90:10, 85:15, 80:20, 75:25, 70:30, 65:35, 60:40, 55:45, 1:1, 45:55, 40:60, 35:65, 30:70, 25:75, 20:80, 15:85, 10:90, 5:95, 1:99, 1:100, 1:200, 1:250, 1:500, 1:1,000, 1:5,000, or 1:10,000, or any combination of any two of these values. In some embodiments, the mixture can have a ratio of Γ-CNTX-Pn1a to one or more PFIPs, on a on a dry weight basis, selected from about the following ratios: 0:50, 45:55, 40:60, 35:65, 30:70, 25:75, 20:80, 15:85, 10:90, 5:95, 1:99, 0.5:99.5, 0.1:99.9 and 0.01:99.99 or any combination of any two of these values.

[1104] In some embodiments, one or more PFIPs and one or more CRIPs can be combined, wherein the one or more CRIPs is one or more toxins isolated from a scorpion. For example, in some embodiments, the toxin can be an imperatoxin. Imperatoxins are peptide toxins derived from the venom of the African scorpion (Pandinus imperator).

[1105] In some embodiments, a one or more PFIPs and one or more CRIPs can be combined, wherein the one or more CRIPs is one or more Imperatoxins.

[1106] In some embodiments, a mixture comprises one or more PFIPs and one or more Imperatoxins, wherein the Imperatoxin A (IpTx-a), or a variant thereof. In some embodiments, the IpTx-a has an amino acid sequence of

(SEQ ID NO: 1827)
GSGDCLPHLKRCKADNDCCGKKCKRRGTNAEKRCR.

[1107] In some embodiments, the method of controlling an insect comprises: applying IpTx-a to an insect; and applying one or more PFIPs to said insect. The foregoing application can be applied concomitantly and/or sequentially, and either in the same or separate mixtures. In some embodiments, IpTx-a and the one or more PFIPs may be applied to (IpTx-a)-resistant insects. In some embodiments, IpTx-a and the one or more PFIPs may be applied to (Bt toxin)-resistant insects. The ratio of IpTx-a to one or more PFIPs, on a dry weight basis, can be selected from at least about the following ratios: 10,000:1, 5,000:1, 1,000:1, 500:1, 250:1, 200:1, 100:1, 99:1, 95:5, 90:10, 85:15, 80:20, 75:25, 70:30, 65:35, 60:40, 55:45, 1:1, 45:55, 40:60, 35:65, 30:70, 25:75, 20:80, 15:85, 10:90, 5:95, 1:99, 1:100, 1:200, 1:250, 1:500, 1:1,000, 1:5,000, or 1:10,000, or any combination of any two of these values. The total concentration of IpTx-a and one or more PFIPs in the mixture is selected from the following percent concentrations: 0, 1, 5, 10, 15, 20, 25, 30, 35, 40, 45, 50, 55, 60, 65, 70, 75, 80, 85, 90, 95, 99 or 100%, or any range between any two of these values, and the remaining percentage of the mixture is comprised of excipients.

[1108] In some embodiments, the mixture comprises both an IpTx-a and one or more PFIPs. The mixture can be in the ratio of IpTx-a to one or more PFIPs, on a dry weight basis, from about any or all of the following ratios: 10,000:1, 5,000:1, 1,000:1, 500:1, 250:1, 200:1, 100:1, 99:1, 95:5, 90:10, 85:15, 80:20, 75:25, 70:30, 65:35, 60:40, 55:45, 1:1, 45:55, 40:60, 35:65, 30:70, 25:75, 20:80, 15:85, 10:90, 5:95, 1:99, 1:100, 1:200, 1:250, 1:500, 1:1,000, 1:5,000, or 1:10,000, or any combination of any two of these values. In some embodiments, the mixture can have a ratio of IpTx-a to one or more PFIPs, on a on a dry weight basis, selected from about the following ratios: 0:50, 45:55, 40:60, 35:65, 30:70, 25:75, 20:80, 15:85, 10:90, 5:95, 1:99, 0.5:99.5, 0.1:99.9 and 0.01:99.99 or any combination of any two of these values.

[1109] Conotoxins are toxins isolated from cone shells; these toxins act by interfering with neuronal communication. Examples of conotoxins include the α-, ω-, μ-, δ-, and κ-conotoxins. Briefly, the α-conotoxins (and αA-&φ-conotoxins) target nicotinic ligand gated channels; ω-conotoxins target voltage-gated calcium channels; μ-conotoxins target the voltage-gated sodium channels; δ-conotoxins target the voltage-gated sodium channel; and κ-conotoxins target the voltage-gated potassium channel.

[1110] In some embodiments, a mixture comprises one or more PFIPs and one or more peptides isolated from organisms belonging to the Conus genus.

[1111] In some embodiments, a mixture comprises one or more PFIPs and one or more peptides isolated from organisms belonging to the Conus genus, wherein the peptide is a conotoxin.

[1112] In some embodiments, a mixture comprises one or more PFIPs and one or more peptides isolated from Conus amadis; Conus catus; Conus ermineus; Conus geographus; Conus gloriamaris; Conus kinoshitai; Conus magus; Conus marmoreus; Conus purpurascens; Conus stercusmuscarum; Conus striatus; Conus textile; or Conus tulipa.

[1113] In some embodiments, a mixture comprises one or more PFIPs and one or more α-conotoxin, αA-conotoxin, φ-conotoxins, ω-conotoxin, μ-conotoxin, δ-conotoxin, or κ-conotoxin.

[1114] Any of the foregoing mixtures, combinations, and/or compositions can be created, formulated, or otherwise made, using any of the PFIPs described herein (e.g., a Bt toxin), and any of the CRIPs described herein. For example, any of the foregoing mixtures, combinations, and/or compositions can be created, formulated, or otherwise made, using one or more CRIPs described herein such as an ACTX peptide, a U-ACTX peptide, an Omega-ACTX peptides, a Kappa-ACTX peptide, a U-ACTX-Hv1a, a U+2-ACTX-Hv1a, a rU-ACTX-Hv1a, a rU-ACTX-Hv1b, a rκ-ACTX-Hv1c, a ω-ACTX-Hv1a, a ω-ACTX-Hv1a+2, a ctenitoxin (CNTX), a Γ-CNTX-Pn1a, an Av2 toxin, an Av3 toxin, an AVP, or another CRIP described herein, or combinations thereof.

[1115] Crops and Pests

[1116] Specific crop pests and insects that may be controlled by these methods include the following: Dictyoptera (cockroaches); Isoptera (termites); Orthoptera (locusts, grasshoppers and crickets); Diptera (house flies, mosquito, tsetse fly, crane-flies and fruit flies); Hymenoptera (ants, wasps, bees, saw-flies, ichneumon flies and gall-wasps); Anoplura (biting and sucking lice); Siphonaptera (fleas); and Hemiptera (bugs and aphids), as well as arachnids such as Acari (ticks and mites), and the parasites that each of these organisms harbor.

[1117] “Pest” includes, but is not limited to: insects, fungi, bacteria, nematodes, mites, ticks, and the like.

[1118] Insect pests include, but are not limited to, insects selected from the orders Coleoptera, Diptera, Hymenoptera, Lepidoptera, Mallophaga, Homoptera, Hemiptera, Orthroptera, Thysanoptera, Dermaptera, Isoptera, Anoplura, Siphonaptera, Trichoptera, and the like. More particularly, insect pests include Coleoptera, Lepidoptera, and Diptera.

[1119] Insects of suitable agricultural, household and/or medical/veterinary importance for treatment with the insecticidal polypeptides include, but are not limited to, members of the following classes and orders:

[1120] The order Coleoptera includes the suborders Adephaga and Polyphaga. Suborder Adephaga includes the superfamilies Caraboidea and Gyrinoidea. Suborder Polyphaga includes the superfamilies Hydrophiloidea, Staphylinoidea, Cantharoidea, Cleroidea, Elateroidea, Dascilloidea, Dryopoidea, Byrrhoidea, Cucujoidea, Meloidea, Mordelloidea, Tenebrionoidea, Bostrichoidea, Scarabaeoidea, Cerambycoidea, Chrysomeloidea, and Curculionoidea. Superfamily Caraboidea includes the families Cicindelidae, Carabidae, and Dytiscidae. Superfamily Gyrinoidea includes the family Gyrinidae. Superfamily Hydrophiloidea includes the family Hydrophilidae. Superfamily Staphylinoidea includes the families Silphidae and Staphylinidae. Superfamily Cantharoidea includes the families Cantharidae and Lampyridae. Superfamily Cleroidea includes the families Cleridae and Dermestidae. Superfamily Elateroidea includes the families Elateridae and Buprestidae. Superfamily Cucujoidea includes the family Coccinellidae. Superfamily Meloidea includes the family Meloidae. Superfamily Tenebrionoidea includes the family Tenebrionidae. Superfamily Scarabaeoidea includes the families Passalidae and Scarabaeidae. Superfamily Cerambycoidea includes the family Cerambycidae. Superfamily Chrysomeloidea includes the family Chrysomelidae. Superfamily Curculionoidea includes the families Curculionidae and Scolytidae.

[1121] Examples of Coleoptera include, but are not limited to: the American bean weevil Acanthoscelides obtectus, the leaf beetle Agelastica alni, click beetles (Agriotes lineatus, Agriotes obscurus, Agriotes bicolor), the grain beetle Ahasverus advena, the summer schafer Amphimallon solstitialis, the furniture beetle Anobium punctatum, Anthonomus spp. (weevils), the Pygmy mangold beetle Atomaria linearis, carpet beetles (Anthrenus spp., Attagenus spp.), the cowpea weevil Callosobruchus maculates, the fried fruit beetle Carpophilus hemipterus, the cabbage seedpod weevil Ceutorhynchus assimilis, the rape winter stem weevil Ceutorhynchus picitarsis, the wireworms Conoderus vespertinus and Conoderus falli, the banana weevil Cosmopolites sordidus, the New Zealand grass grub Costelytra zealandica, the June beetle Cotinis nitida, the sunflower stem weevil Cylindrocopturus adspersus, the larder beetle Dermestes lardarius, the corn rootworms Diabrotica virgifera, Diabrotica virgifera virgifera, and Diabrotica barberi, the Mexican bean beetle Epilachna varivestis, the old house borer Hylotropes bajulus, the lucerne weevil Hypera postica, the shiny spider beetle Gibbium psylloides, the cigarette beetle Lasioderma serricorne, the Colorado potato beetle Leptinotarsa decemlineata, Lyctus beetles (Lyctus spp.), the pollen beetle Meligethes aeneus, the common cockshafer Melolontha melolontha, the American spider beetle Mezium americanum, the golden spider beetle Niptus hololeucus, the grain beetles Oryzaephilus surinamensis and Oryzaephilus mercator, the black vine weevil Otiorhynchus sulcatus, the mustard beetle Phaedon cochleariae, the crucifer flea beetle Phyllotreta cruciferae, the striped flea beetle Phyllotreta striolata, the cabbage steam flea beetle Psylliodes chrysocephala, Ptinus spp. (spider beetles), the lesser grain borer Rhizopertha dominica, the pea and been weevil Sitona lineatus, the rice and granary beetles Sitophilus oryzae and Sitophilus granaries, the red sunflower seed weevil Smicronyx fulvus, the drugstore beetle Stegobium paniceum, the yellow mealworm beetle Tenebrio molitor, the flour beetles Tribolium castaneum and Tribolium confusum, warehouse and cabinet beetles (Trogoderma spp.), and the sunflower beetle Zygogramma exclamationis.

[1122] Examples of Dermaptera (earwigs) include, but are not limited to: the European earwig Forficula auricularia, and the striped earwig Labidura riparia.

[1123] Examples of Dictvontera include, but are not limited to: the oriental cockroach Blatta orientalis, the German cockroach Blatella germanica, the Madeira cockroach Leucophaea maderae, the American cockroach Periplaneta americana, and the smokybrown cockroach Periplaneta fuliginosa.

[1124] Examples of Diplonoda include, but are not limited to: the spotted snake millipede Blaniulus guttulatus, the flat-back millipede Brachydesmus superus, and the greenhouse millipede Oxidus gracilis.

[1125] The order Diptera includes the Suborders Nematocera, Brachycera, and Cyclorrhapha. Suborder Nematocera includes the families Tipulidae, Psychodidae, Culicidae, Ceratopogonidae, Chironomidae, Simuliidae, Bibionidae, and Cecidomyiidae. Suborder Brachycera includes the families Stratiomyidae, Tabanidae, Therevidae, Asilidae, Mydidae, Bombyliidae, and Dolichopodidae. Suborder Cyclorrhapha includes the Divisions Aschiza and Aschiza. Division Aschiza includes the families Phoridae, Syrphidae, and Conopidae. Division Aschiza includes the Sections Acalyptratae and Calyptratae. Section Acalyptratae includes the families Otitidae, Tephritidae, Agromyzidae, and Drosophilidae. Section Calyptratae includes the families Hippoboscidae, Oestridae, Tachinidae, Anthomyiidae, Muscidae, Calliphoridae, and Sarcophagidae.

[1126] Examples of Diptera include, but are not limited to: the house fly (Musca domestica), the African tumbu fly (Cordylobia anthropophaga), biting midges (Culicoides spp.), bee louse (Braula spp.), the beet fly Pegomyia betae, blackflies (Cnephia spp., Eusimulium spp., Simulium spp.), bot flies (Cuterebra spp., Gastrophilus spp., Oestrus spp.), craneflies (Tipula spp.), eye gnats (Hippelates spp.), filth-breeding flies (Calliphora spp., Fannia spp., Hermetia spp., Lucilia spp., Musca spp., Muscina spp., Phaenicia spp., Phormia spp.), flesh flies (Sarcophaga spp., Wohlfahrtia spp.); the flit fly Oscinella frit, fruitflies (Dacus spp., Drosophila spp.), head and canon flies (Hydrotea spp.), the hessian fly Mayetiola destructor, horn and buffalo flies (Haematobia spp.), horse and deer flies (Chrysops spp., Haematopota spp., Tabanus spp.), louse flies (Lipoptena spp., Lynchia spp., and Pseudolynchia spp.), medflies (Ceratitus spp.), mosquitoes (Aedes spp., Anopheles spp., Culex spp., Psorophora spp.), sandflies (Phlebotomus spp., Lutzomyia-spp.), screw-worm flies (Chtysomya bezziana and Cochliomyia hominivorax), sheep keds (Melophagus spp.); stable flies (Stomoxys spp.), tsetse flies (Glossina spp.), and warble flies (Hypoderma spp.).

[1127] Examples of Isontera (termites) include, but are not limited to: species from the familes Hodotennitidae, Kalotermitidae, Mastotermitidae, Rhinotennitidae, Serritermitidae, Termitidae, Termopsidae.

[1128] Examples of Heteroptera include, but are not limited to: the bed bug Cimex lectularius, the cotton stainer Dysdercus intermedius, the Sunn pest Eurygaster integriceps, the tarnished plant bug Lygus lineolaris, the green stink bug Nezara antennata, the southern green stink bug Nezara viridula, and the triatomid bugs Panstrogylus megistus, Rhodnius ecuadoriensis, Rhodnius pallescans, Rhodnius prolixus, Rhodnius robustus, Triatoma dimidiata, Triatoma infestans, and Triatoma sordida.

[1129] Examples of Homoptera include, but are not limited to: the California red scale Aonidiella aurantii, the black bean aphid Aphis fabae, the cotton or melon aphid Aphis gossypii, the green apple aphid Aphis pomi, the citrus spiny whitefly Aleurocanthus spiniferus, the oleander scale Aspidiotus hederae, the sweet potato whitefly Bemesia tabaci, the cabbage aphid Brevicoryne brassicae, the pear psylla Cacopsylla pyricola, the currant aphid Cryptomyzus ribis, the grape phylloxera Daktulosphaira vitifoliae, the citrus psylla Diaphorina citri, the potato leafhopper Empoasca fabae, the bean leafhopper Empoasca solana, the vine leafhopper Empoasca vitis, the woolly aphid Eriosoma lanigerum, the European fruit scale Eulecanium corni, the mealy plum aphid Hyalopterus arundinis, the small brown planthopper Laodelphax striatellus, the potato aphid Macrosiphum euphorbiae, the green peach aphid Myzus persicae, the green rice leafhopper Nephotettix cinticeps, the brown planthopper Nilaparvata lugens, gall-forming aphids (Pemphigus spp.), the hop aphid Phorodon humuli, the bird-cherry aphid Rhopalosiphum padi, the black scale Saissetia oleae, the greenbug Schizaphis graminum, the grain aphid Sitobion avenae, and the greenhouse whitefly Trialeurodes vaporariorum.

[1130] Examples of Isopoda include, but are not limited to: the common pillbug Armadillidium vulgare and the common woodlouse Oniscus asellus.

[1131] The order Lepidoptera includes the families Papilionidae, Pieridae, Lycaenidae, Nymphalidae, Danaidae, Satyridae, Hesperiidae, Sphingidae, Satumiidae, Geometridae, Arctiidae, Noctuidae, Lymantriidae, Sesiidae, and Tineidae.

[1132] Examples of Lepidoptera include, but are not limited to: Adoxophyes orana (summer fruit Tortrix moth), Agrotis ipsolon (black cutworm), Archips podana (fruit tree Tortrix moth), Bucculatrix pyrivorella (pear leafminer), Bucculatrix thurberiella (cotton leaf perforator), Bupalus piniarius (pine looper), Carpocapsa pomonella (codling moth), Chilo suppressalis (striped rice borer), Choristoneura fumiferana (eastern spruce budworm), Cochylis hospes (banded sunflower moth), Diatraea grandiosella (southwestern corn borer), Earls insulana (Egyptian bollworm), Euphestia kuehniella (Mediterranean flour moth), Eupoecilia ambiguella (European grape berry moth), Euproctis chrysorrhoea (brown-tail moth), Euproctis subflava (oriental tussock moth), Galleria mellonella (greater wax moth), Helicoverpa armigera (cotton bollworm), Helicoverpa zea (cotton bollworm), Heliothis virescens (tobacco budworm), Hofmannophila pseudopretella (brown house moth), Homeosoma electellum (sunflower moth), Homona magnanima (oriental tea tree Tortrix moth), Lithocolletis blancardella (spotted tentiform leafminer), Lymantria dispar (gypsy moth), Malacosoma neustria (tent caterpillar), Mamestra brassicae (cabbage armyworm), Mamestra configurata (Bertha armyworm), the hornworms Manduca sexta and Manuduca quinquemaculata, Operophtera brumata (winter moth), Ostrinia nubilalis (European corn borer), Panolis flammea (pine beauty moth), Pectinophora gossypiella (pink bollworm), Phyllocnistis citrella (citrus leafminer), Pieris brassicae (cabbage white butterfly), Plutella xylostella (diamondback moth), Rachiplusia ni (soybean looper), Spilosoma virginica (yellow bear moth), Spodoptera exigua (beet armyworm), Spodoptera frugiperda (fall armyworm), Spodoptera littoralis (cotton leafworm), Spodoptera litura (common cutworm), Spodoptera praefica (yellowstriped armyworm), Sylepta derogata (cotton leaf roller), Tineola bisselliella (webbing clothes moth), Tineola pellionella (case-making clothes moth), Tortrix viridana (European oak leafroller), Trichoplusia ni (cabbage looper), and Yponomeuta padella (small ermine moth).

[1133] Examples of Orthoptera include, but are not limited to: the common cricket Acheta domesticus, tree locusts (Anacridium spp.), the migratory locust Locusta migratoria, the twostriped grasshopper Melanoplus bivittatus, the differential grasshopper Melanoplus dfferentialis, the redlegged grasshopper Melanoplus femurrubrum, the migratory grasshopper Melanoplus sanguinipes, the northern mole cricket Neocurtilla hexadectyla, the red locust Nomadacris septemfasciata, the shortwinged mole cricket Scapteriscus abbreviatus, the southern mole cricket Scapteriscus borellii, the tawny mole cricket Scapteriscus vicinus, and the desert locust Schistocerca gregaria.

[1134] Examples of Phthiraptera include, but are not limited to: the cattle biting louse Bovicola bovis, biting lice (Damalinia spp.), the cat louse Felicola subrostrata, the shortnosed cattle louse Haematopinus eloysternus, the tail-switch louse Haematopinus quadriperiussus, the hog louse Haematopinus suis, the face louse Linognathus ovillus, the foot louse Linognathus pedalis, the dog sucking louse Linognathus setosus, the long-nosed cattle louse Linognathus vituli, the chicken body louse Menacanthus stramineus, the poultry shaft louse Menopon gallinae, the human body louse Pediculus humanus, the pubic louse Phthirus pubis, the little blue cattle louse Solenopotes capillatus, and the dog biting louse Trichodectes canis.

[1135] Examples of Psocoptera include, but are not limited to: the booklice Liposcelis bostrychophila, Liposcelis decolor, Liposcelis entomophila, and Trogium pulsatorium. Examples of Siphonaptera include, but are not limited to: the bird flea Ceratophyllus gallinae, the dog flea Ctenocephalides canis, the cat flea Ctenocephalides fells, the human flea Pulex irritans, and the oriental rat flea Xenopsylla cheopis.

[1136] Examples of Symphyla include, but are not limited to: the garden symphylan Scutigerella immaculate.

[1137] Examples of Thysanura include, but are not limited to: the gray silverfish Ctenolepisma longicaudata, the four-lined silverfish Ctenolepisma quadriseriata, the common silverfish Lepisma saccharina, and the firebrat Thennobia domestica;

[1138] Examples of Thysanoptera include, but are not limited to: the tobacco Thrips Frankliniella fusca, the flower Thrips Frankliniella intonsa, the western flower Thrips Frankliniella occidentalis, the cotton bud Thrips Frankliniella schultzei, the banded greenhouse Thrips Hercinothrips femoralis, the soybean Thrips Neohydatothrips variabilis, Kelly's citrus Thrips Pezothrips kellyanus, the avocado Thrips Scirtothrips perseae, the melon Thrips Thrips palmi, and the onion Thrips Thrips tabaci.

[1139] Examples of Nematodes include, but are not limited to: parasitic nematodes such as root-knot, cyst, and lesion nematodes, including Heterodera spp., Meloidogyne spp., and Globodera spp.; particularly members of the cyst nematodes, including, but not limited to: Heterodera glycines (soybean cyst nematode); Heterodera schachtii (beet cyst nematode); Heterodera avenae (cereal cyst nematode); and Globodera rostochiensis and Globodera pailida (potato cyst nematodes). Lesion nematodes include, but are not limited to: Pratylenchus spp.

[1140] Other insect species susseptible to a CRIP and/or PFIP of the present disclosure includes: athropod pests which cause public and animal health concerns, for example, mosquitos for example, mosquitoes from the genera Aedes, Anopheles and Culex, from ticks, flea, and flies etc.

[1141] In one embodiment, the insecticidal mixtures comprising the polypeptides, polynucleotides, cells, vectors, etc., can be employed to treat ectoparasites. Ectoparasites include, but are not limited to: fleas, ticks, mange, mites, mosquitoes, nuisance and biting flies, lice, and combinations comprising one or more of the foregoing ectoparasites. The term “fleas” includes the usual or accidental species of parasitic flea of the order Siphonaptera, and in particular the species Ctenocephalides, in particular C. fells and C. cams, rat fleas (Xenopsylla cheopis) and human fleas (Pulex irritans).

[1142] Insect pests of the invention for the major crops include, but are not limited to: Maize: Ostrinia nubilalis, European corn borer; Agrotis ipsilon, black cutworm; Helicoverpa zea, corn earworm; Spodoptera frugiperda, fall armyworm; Diatraea grandiosella, southwestern corn borer; Elasmopalpus lignosellus, lesser cornstalk borer; Diatraea saccharalis, surgarcane borer; Diabrotica virgifera, western corn rootworm; Diabrotica longicornis barberi, northern corn rootworm; Diabrotica undecimpunctata howardi, southern corn rootworm; Melanotus spp., wireworms; Cyclocephala borealis, northern masked chafer (white grub); Cyclocephala immaculata, southern masked chafer (white grub); Popillia japonica, Japanese beetle; Chaetocnema pulicaria, corn flea beetle; Sphenophorus maidis, maize billbug; Rhopalosiphum maidis, corn leaf aphid; Anuraphis maidiradicis, corn root aphid; Blissus leucopterus leucopterus, chinch bug; Melanoplus femurrubrum, redlegged grasshopper; Melanoplus sanguinipes, migratory grasshopper; Hylemya platura, seedcorn maggot; Agromyza parvicornis, corn blot leafminer; Anaphothrips obscrurus, grass Thrips; Solenopsis milesta, thief ant; Tetranychus urticae, twospotted spider mite; Sorghum: Chilo partellus, sorghum borer; Spodoptera frugiperda, fall armyworm; Helicoverpa zea, corn earworm; Elasmopalpus lignosellus, lesser cornstalk borer; Feltia subterranea, granulate cutworm; Phyllophaga crinita, white grub; Eleodes, Conoderus, and Aeolus spp., wireworms; Oulema melanopus, cereal leaf beetle; Chaetocnema pulicaria, corn flea beetle; Sphenophorus maidis, maize billbug; Rhopalosiphum maidis, corn leaf aphid; Sipha flava, yellow sugarcane aphid; Blissus leucopterus leucopterus, chinch bug; Contarinia sorghicola, sorghum midge; Tetranychus cinnabarinus, carmine spider mite; Tetranychus urticae, twospotted spider mite; Wheat: Pseudaletia unipunctata, army worm; Spodoptera frugiperda, fall armyworm; Elasmopalpus lignosellus, lesser cornstalk borer; Agrotis orthogonia, western cutworm; Elasmopalpus lignosellus, lesser cornstalk borer; Oulema melanopus, cereal leaf beetle; Hypera punctata, clover leaf weevil; Diabrotica undecimpunctata howardi, southern corn rootworm; Russian wheat aphid; Schizaphis graminum, greenbug; Macrosiphum avenae, English grain aphid; Melanoplus femurrubrum, redlegged grasshopper; Melanoplus differentialis, differential grasshopper; Melanoplus sanguinipes, migratory grasshopper; Mayetiola destructor, Hessian fly; Sitodiplosis mosellana, wheat midge; Meromyza americana, wheat stem maggot; Hylemya coarctata, wheat bulb fly; Frankliniella fusca, tobacco Thrips; Cephus cinctus, wheat stem sawfly; Aceria tulipae, wheat curl mite; Sunflower: Suleima helianthana, sunflower bud moth; Homoeosoma electellum, sunflower moth; Zygogramma exclamationis, sunflower beetle; Bothyrus gibbosus, carrot beetle; Neolasioptera murtfeldtiana, sunflower seed midge; Cotton: Heliothis virescens, cotton budworm; Helicoverpa zea, cotton bollworm; Spodoptera exigua, beet armyworm; Pectinophora gossypiella, pink bollworm; Anthonomus grandis, boll weevil; Aphis gossypii, cotton aphid; Pseudatomoscelis seriatus, cotton fleahopper; Trialeurodes abutilonea, banded winged whitefly; Lygus lineolaris, tarnished plant bug; Melanoplus femurrubrum, redlegged grasshopper; Melanoplus differentialis, differential grasshopper; Thrips tabaci, onion Thrips; Franklinkiella fusca, tobacco Thrips; Tetranychus cinnabarinus, carmine spider mite; Tetranychus urticae, twospotted spider mite; Rice: Diatraea saccharalis, sugarcane borer; Spodoptera frugiperda, fall armyworm; Helicoverpa zea, corn earworm; Colaspis brunnea, grape colaspis; Lissorhoptrus oryzophilus, rice water weevil; Sitophilus oryzae, rice weevil; Nephotettix nigropictus, rice leafhopper; Blissus leucopterus, chinch bug; Acrosternum hilare, green stink bug; Soybean: Pseudoplusia includens, soybean looper; Anticarsia gemmatalis, velvet bean caterpillar; Plathypena scabra, green clover worm; Ostrinia nubilalis, European corn borer; Agrotis ipsilon, black cutworm; Spodoptera exigua, beet armyworm; Heliothis virescens, cotton budworm; Helicoverpa zea, cotton bollworm; Epilachna varivestis, Mexican bean beetle; Myzus persicae, green peach aphid; Empoasca fabae, potato leafhopper; Acrosternum hilare, green stink bug; Melanoplus femurrubrum, redlegged grasshopper; Melanoplus differentialis, differential grasshopper; Hylemya platura, seedcorn maggot; Sericothrips variabilis, soybean Thrips; Thrips tabaci, onion Thrips; Tetranychus turkestani, strawberry spider mite; Tetranychus urticae, twospotted spider mite; Barley: Ostrinia nubilalis, European corn borer; Agrotis ipsilon, black cutworm; Schizaphis graminum, greenbug; Blissus leucopterus leucopterus, chinch bug; Acrosternum hilare, green stink bug; Euschistus servus, brown stink bug; Delia platura, seedcorn maggot; Mayetiola destructor, Hessian fly; Petrobia latens, brown wheat mite; Oil Seed Rape: Brevicoryne brassicae, cabbage aphid; Phyllotreta cruciferae, Flea beetle; Mamestra configurata, Bertha armyworm; Plutella xylostella, Diamond-back moth; Delia ssp., Root maggots.

[1143] In some embodiments, the insecticidal mixtures can be employed to treat combinations comprising one or more of the foregoing insects.

[1144] The insects that are susceptible to the peptides of this invention include but are not limited to the following: Cyt toxins affected families such as: Blattaria, Coleoptera, Collembola, Diptera, Echinostomida, Hemiptera, Hymenoptera, Isoptera, Lepidoptera, Neuroptera, Orthoptera, Rhabditida, Siphonoptera, Thysanoptera. Genus-Species are indicated as follows: Actebia-fennica, Agrotis-ipsilon, A.-segetum, Anticarsia-gemmatalis, Argyrotaenia-citrana, Artogeia-rapae, Bombyx mori, Busseola-fusca, Cacyreus-marshall, Chilo-suppressalis, Christoneura-fumiferana, C.-occidentalis, C.-pinus pinus, C.-rosacena, Cnaphalocrocis-medinalis, Conopomorpha-cramerella, Ctenopsuestis-obliquana, Cydia-pomonella, Danaus-plexippus, Diatraea-saccharallis, D.-grandiosella, Earias-vittella, Elasmolpalpus-lignoselius, Eldana-saccharina, Ephestia-kuehniella, Epinotia-aporema, Epiphyas-postvittana, Galleria-mellonella, Genus Species, Helicoverpa-zea, H.-punctigera, H.-armigera, Heliothis-virescens, Hyphantria-cunea, Lambdina-fiscellaria, Leguminivora-glycinivorella, Lobesia-botrana, Lymantria-dispar, Malacosoma-disstria, Mamestra-brassicae, M. configurata, Manduca-sexta, Marasmia-patnalis, Maruca-vitrata, Orgyia-leucostigma, Ostrinia-nubilalis, O.-furnacalis, Pandemis-pyrusana, Pectinophora-gossypiella, Perileucoptera-coffeella, Phthorimaea-opercullela, Pianotortrix-octo, Piatynota-stultana, Pieris-brassicae, Plodia-interpunctala, Plutella-xylostella, Pseudoplusia-includens, Rachiplusia-nu, Sciropophaga-incertulas, Sesamia-calamistis, Spilosoma-virginica, Spodoptera-exigua, S.-frugiperda, S.-littoralis, S.-exempta, S.-litura, Tecia-solanivora, Thaumetopoea-pityocampa, Trichoplusia-ni, Wiseana-cervinata, Wiseana-copularis, Wiseana-jocosa, Blattaria-Blattella, Collembola-Xenylla, C.-Folsomia, Echinostomida-Fasciola, Hemiptera-Oncopeltrus, He.-Bemisia, He.-Macrosiphum, He.-Rhopalosiphum, He.-Myzus, Hymenoptera-Diprion, Hy.-Apis, Hy.-Macrocentrus, Hy.-Meteorus, Hy.-Nasonia, Hy.-Solenopsis, Isopoda-Porcellio, Isoptera-Reticulitermes, Orthoptera-Achta, Prostigmata-Tetranychus, Rhabitida-Acrobeloides, R.-Caenorhabditis, R.-Distolabrellus, R.-Panagrellus, R.-Pristionchus, R.-Pratylenchus, R.-Ancylostoma, R.-Nippostrongylus, R.-Panagrellus, R.-Haemonchus, R.-Meloidogyne, and Siphonaptera-Ctenocephalides.

[1145] The present disclosure provides methods for plant transformation, which may be used for transformation of any plant species, including, but not limited to, monocots and dicots. Crops for which a transgenic approach or plaint incorporated protectants (PIP) would be an especially useful approach include, but are not limited to: alfalfa, cotton, tomato, maize, wheat, corn, sweet corn, lucerne, soybean, sorghum, field pea, linseed, safflower, rapeseed, oil seed rape, rice, soybean, barley, sunflower, trees (including coniferous and deciduous), flowers (including those grown commercially and in greenhouses), field lupins, switchgrass, sugarcane, potatoes, tomatoes, tobacco, crucifers, peppers, sugarbeet, barley, and oilseed rape, Brassica sp., rye, millet, peanuts, sweet potato, cassaya, coffee, coconut, pineapple, citrus trees, cocoa, tea, banana, avocado, fig, guava, mango, olive, papaya, cashew, macadamia, almond, oats, vegetables, ornamentals, and conifers.

[1146] Insecticide-Resistant Pests

[1147] Resistance to insecticides occurs when there is a heritable change in the sensitivity of a pest population to insecticides; this change in sensitivity can be observed in the failure of an insecticide to achieve the desired result and/or expected degree of control when used as intended. Cross-resistance describes a pest's resistance to one insecticide that in turn confers resistance to another different insecticide-even in cases where said pest has not been confronted with the other insecticide. Information about insecticide resistance can be found on the Insecticide Resistance Action Committee (IRAC) website (https://www.irac-online.org/). Reports of insecticide resistance in insects and other pests, and the insecticides appertaining thereunto, can be found at the Arthropod Pesticide Resistance Database (APRD) (https://www.pesticideresistance.org/).

[1148] In some embodiments, an insect and/or pest may be resistant or at least partially resistant to one or more insecticides. For example, in some embodiments, an insect and/or pest may be resistant or at least partially resistant to one or more of the following insecticides: Acetylcholinesterase (AchE) inhibitors (e.g., carbamates such as alanycarb, aldicarb, bendiocarb, benfuracarb, butocarboxim, butoxycarboxim, carbaryl, carbofuran, carbosulfan, ethiofencarb, fenobucarb, formetanate, furathiocarb, isoprocarb, methiocarb, methomyl, metolcarb, oxamyl, pirimicarb, propoxur, thiodicarb, thiofanox, triazamate, trimethacarb, xmc, and xylylcarb; and organophosphates such as acephate, azamethiphos, azinphos-ethyl, azinphos-methyl, cadusafos, chlorethoxyfos, chlorfenvinphos, chlormephos, chlorpyrifos, chlorpyrifos-methyl, coumaphos, cyanophos, demeton-s-methyl, diazinon, dichlorvos/ddvp, dicrotophos, dimethoate, dimethylvinphos, disulfoton, epn, ethion, ethoprophos, famphur, fenamiphos, fenitrothion, fenthion, fosthiazate, heptenophos, isofenphos, isoxathion, malathion, mecarbam, methamidophos, methidathion, mevinphos, monocrotophos, naled, omethoate, oxydemeton-methyl, parathion, parathion-methyl, phenthoate, phosalone, phorate, phosmet, phosphamidon, phoxim, profenofos, propetamphos, prothiofos, pyraclofos, pyridaphenthion, quinalphos, sulfotep, tebupirimfos, temephos, terbufos, tetrachlorvinphos, thiometon, triazophos, trichlorfon, vamidothion, pirimiphos-methyl, imicyafos, and isopropyl o-(methoxyaminothio-phosphoryl) salicylate); Gaba-gated chloride channel blockers (e.g., cyclodiene organochlorines such as chlordane, and endosulfan; and phenylpyrazoles (fiproles) such as ethiprole, and fipronil); Sodium channel modulators (e.g., pyrethroids and pyrethrins such as acrinathrin, allethrin, d-cis-trans allethrin, d-trans allethrin, bifenthrin, bioallethrin, bioallethrin s-cyclopentenyl, bioresmethrin, cycloprothrin, cyfluthrin, beta-cyfluthrin, cyhalothrin, lambda-cyhalothrin, gamma-cyhalothrin, cypermethrin, alpha-cypermethrin, beta-cypermethrin, theta-cypermethrin, zeta-cypermethrin, cyphenothrin [(1r)-trans-isomers], deltamethrin, empenthrin [(ez)-(1r)-isomers], esfenvalerate, etofenprox, fenpropathrin, fenvalerate, flucythrinate, flumethrin, tau-fluvalinate, kadathrin, pyrethrins (pyrethrum), halfenprox, phenothrin [(1r)-trans-isomer], prallethrin, resmethrin, silafluofen, tefluthrin, tetramethrin, tetramethrin [(1r)-isomers], tralomethrin, transfluthrin, permethrin; ddt and methoxychlor); Nicotinic acetvlcholine receptor (nAchR) competitive modulators (e.g., neonicotinoids such as acetamiprid, clothianidin, dinotefuran, imidacloprid, nitenpyram, thiacloprid, thiamethoxam; nicotine; sulfoximines such as sulfoxaflor; butenolides such as flupyradifurone; and mesoionics such as triflumezopyrim); Nicotinic acetvlcholine receptor (nAchR) allosteric modulators—site I (e.g., spinosyns such as spinetoram and spinosad); Glutamate-gated chloride channel (GluCl) allosteric modulators (e.g., avermectins and milbemycins such as abamectin, emamectin benzoate, lepimectin, and milbemectin); Juvenile hormone mimics (e.g., juvenile hormone analogues such as hydroprene, kinoprene, and methoprene; fenoxycarb; and pyriproxyfen); Miscellaneous non-specific (multi-site) inhibitors (e.g., alkyl halides such as methyl bromide and other alkyl halides; chloropicrin; fluorides such as cryolite and sulfuryl fluoride; borates such as borax, boric acid, disodium octaborate, sodium borate, and sodium metaborate; tartar emetic; and methyl isothiocyanate generators such as dazomet and metam); Chordotonal organ TRPV channel modulators (e.g., pyridine azomethine derivatives such as pymetrozine, pyrifluquinazon; and pyropenes such as afidopyropen); Mite growth inhibitors (e.g., clofentezine and diflovidazin, hexythiazox such as clofentezine, diflovidazin, and hexythiazox; and etoxazole); Inhibitors of mitochondrial ATP synthase (e.g., diafenthiuron; organotin miticides such as azocyclotin, cyhexatin, and fenbutatin oxide; propargite; and tetradifon); Uncouplers of oxidative phosphorylation via disruption of the proton gradient (e.g., pyrroles, dinitrophenols, and sulfluramid, e.g., chlorfenapyr, dnoc, and sulfluramid); Nicotinic acetylcholine receptor (nAchR) channel blockers (e.g., nereistoxin analogues such as bensultap, cartap hydrochloride, thiocyclam, thiosultap-sodium); Inhibitors of chitin biosynthesis, type 0 (e.g., benzoylureas such as bistrifluron, chlorfluazuron, diflubenzuron, flucycloxuron, flufenoxuron, hexaflumuron, lufenuron, novaluron, noviflumuron, teflubenzuron, and triflumuron); Ecdysone receptor agonists (e.g., diacylhydrazines such as chromafenozide, halofenozide, methoxyfenozide, and tebufenozide); Octopamine receptor agonists (e.g., amitraz); Mitochondrial complex III electron transport inhibitors (e.g., hydramethylnon; acequinocyl; fluacrypyrim; and bifenazate); Mitochondrial complex I electron transport inhibitors (e.g., meti acaricides and insecticides such as fenazaquin, fenpyroximate, pyrimidifen, pyridaben, tebufenpyrad, and tolfenpyrad; and rotenone); Voltage-dependent sodium channel blockers (e.g., oxadiazines such as indoxacarb; and semicarbazones such as metaflumizone); Inhibitors of acetyl co-enzyme A carboxylase (e.g., tetronic and tetramic acid derivatives such as spirodiclofen, spiromesifen, spiropidion, and spirotetramat); Mitochondrial complex IV electron transport inhibitors (e.g., phosphides such as aluminum phosphide, calcium phosphide, phosphine, and zinc phosphide; and cyanides such as calcium cyanide, potassium cyanide, and sodium cyanide); Mitochondrial complex II electron transport inhibitors (e.g., beta-ketonitrile derivatives such as cyenopyrafen and cyflumetofen; and carboxanilides such as pyflubumide); Ryanodine receptor modulators (e.g., diamides such as chlorantraniliprole, cyantraniliprole, cyclaniliprole, flubendiamide, and tetraniliprole); Chordotonal organ modulators—undefined target site (e.g., flonicamid); GABA-gated chloride channel allosteric modulators (e.g., meta-diamides and isoxazolines such as broflanilide, fluxametamide); and/or Compounds of unknown or uncertain MoA (e.g., azadirachtin; benzoximate; bromopropylate; chinomethionat; dicofol; lime sulfur; pyridalyl; and sulfur).

[1149] In some embodiments, an insect and/or pest may be resistant or at least partially resistant to any one or more of the insecticides described herein.

[1150] In some embodiments, the compositions, mixtures, and/or methods of the present invention can be applied to the locus of an insect and/or pest that is resistant or at least partially resistant to one or more insecticides, said insect and/or pest selected from the group consisting of the following commonly known insects and/or pests: yellow fever mosquito; Corn stalk borer; Asiatic rice borer; house mosquito; southern house mosquito; western corn rootworm; sugarcane borer; cotton bollworm; corn earworm; tobacco budworm; Colorado potato beetle; Asian corn borer; European corn borer; pink bollworm; Indian meal moth; diamond-back moth; soybean looper; beet army worm, lesser army worm; fall armyworm; Egyptian cotton leafworm, army worm; or cabbage looper.

[1151] In some embodiments, the compositions, mixtures, and/or methods of the present invention can be applied to the locus of an insect and/or pest that is resistant or at least partially resistant to one or more insecticides, wherein said insect and/or pest selected is a blackfly or nuisance fly (e.g., Psychoda spp. And Chironomus spp.).

[1152] In some embodiments, an insect and/or pest may be resistant or at least partially resistant to one or more insecticides can be a lepidopteran, e.g., a diamondback moth.

[1153] In some embodiments, the compositions, mixtures, and/or methods of the present invention can be applied to the locus of an insect and/or pest that is resistant or at least partially resistant to one or more insecticides, said insect and/or pest selected from the group consisting of: Loopers; Omnivorous Leafroller; Hornworms; Imported Cabbageworm; Diamondback Moth; Green Cloverworm; Webworm; Saltmarsh Caterpillar; Armyworms; Cutworms; Cross-Striped Cabbageworm; Podworms; Velvetbean Caterpillar; Soybean Looper; Tomato Fruitworm; Variegated Cutworm; Melonworms; Rindworm complex; Fruittree Leafroller; Citrus Cutworm; Heliothis; Orangedog; Citrus Cutworm; Redhumped Caterpillar; Tent Caterpillars; Fall Webworm; Walnut Caterpillar; Cankerworms; Gypsy Moth; Variegated Leafroller; Redbanded Leafroller; Tufted Apple Budmoth; Oriental Fruit Moth; Filbert Leafroller; Obliquebanded Leafroller; Codling Moth; Twig Borer; Grapeleaf Skeletonizer; Grape Leafroller; Achema Sphinx Moth (Hornworm); Orange Tortrix; Tobacco Budworm; Grape Berry Moth; Spanworm; Alfalfa Caterpillar; Cotton Bollworm; Head Moth; Amorbia Moth; Omnivorous Looper; Ello Moth (Hornworm); io Moth; Oleander Moth; Azalea Caterpillar; Hornworm; Leafrollers; Banana Skipper; Batrachedra comosae (Hodges); Thecla Moth; Artichoke Plume Moth; Thistle Butterfly; Bagworm; Spring & Fall Cankerworm; Elm Spanworm; California Oakworm; Pine Butterfly; Spruce Budworms; Saddle Prominent Caterpillar; Douglas Fir Tussock Moth; Western Tussock Moth; Blackheaded Budworm; Mimosa Webworm; Jack Pine Budworm; Saddleback Caterpillar; Greenstriped Mapleworm; or Hemlock Looper.

[1154] In some embodiments, an insect and/or pest may be resistant or at least partially resistant to one or more insecticides can be a Colorado potato beetle or an Elm Leaf Beetle.

[1155] In some embodiments, the compositions, mixtures, and/or methods of the present invention can be applied to the locus of an insect and/or pest that is resistant or at least partially resistant to one or more insecticides, said insect and/or pest selected from the group consisting of: Achema Sphinx Moth (Hornworm) (Eumorpha achemon); Alfalfa Caterpillar (Colias eurytheme); Almond Moth (Caudra cautella); Amorbia Moth (Amorbia humerosana); Armyworm (Spodoptera spp., e.g. exigua, frugiperda, littoralis, Pseudaletia unipuncta); Artichoke Plume Moth (Platyptilia carduidactyla); Azalea Caterpillar (Datana major); Bagworm (Thyridopteryx); ephemeraeformis); Banana Moth (Hypercompe scribonia); Banana Skipper (Erionota thrax); Blackheaded Budworm (Acleris gloverana); California Oakworm (Phryganidia californica); Spring Cankerworm (Paleacrita merriccata); Cherry Fruitworm (Grapholita packardi); China Mark Moth (Nymphula stagnata); Citrus Cutworm (Xylomyges curialis); Codling Moth (Cydiapomonella); Cranberry Fruitworm (Acrobasis vaccinii); Cross-striped Cabbageworm (Evergestis rimosalis); Cutworm (Noctuid species, Agrotis ipsilon); Douglas Fir Tussock Moth (Orgyia pseudotsugata); Ello Moth (Hornworm) (Erinnyis ello); Elm Spanworm (Ennomos subsignaria); European Grapevine Moth (Lobesia botrana); European Skipper (Thymelicus lineola (Essex Skipper); Fall Webworm (Melissopus latiferreanus; Filbert Leafroller (Archips rosanus; Fruittree Leafroller (Archips argyrospilia; Grape Berry Moth (Paralobesia viteana; Grape Leafroller (Platynota stultana; Grapeleaf Skeletonizer (Harrisina americana (ground only); Green Cloverworm (Plathypena scabra; Greenstriped Mapleworm (Dryocampa rubicunda; Gummosos-Batrachedra; Comosae (Hodges); Gypsy Moth (Lymantria dispar); Hemlock Looper (Lambdina fiscellaria); Hornworm (Manduca spp.); Imported Cabbageworm (Pieris rapae); io Moth (Automeris io); Jack Pine Budworm (Choristoneura pinus); Light Brown Apple Moth (Epiphyas postvittana); Melonworm (Diaphania hyalinata); Mimosa Webworm (Homadaula anisocentra); Obliquebanded Leafroller (Choristoneura rosaceana); Oleander Moth (Syntomeida epilais); Omnivorous Leafroller (Playnota stultana); Omnivorous Looper (Sabulodes aegrotata); Orangedog (Papilio cresphontes); Orange Tortrix (Argyrotaenia citrana); Oriental Fruit Moth (Grapholita molesta); Peach Twig Borer (Anarsia lineatella); Pine Butterfly (Neophasia menapia); Podworm (Heliocoverpa zea); Redbanded Leafroller (Argyrotaenia velutinana); Redhumped Caterpillar (Schizura concinna); Rindworm Complex (Various Leps.); Saddleback Caterpillar (Sibine stimulea); Saddle Prominent Caterpillar Heterocampa guttivitta); Saltmarsh Caterpillar (Estigmene acrea); Sod Webworm (Crambus spp.); Spanworm (Ennomos subsignaria); Fall Cankerworm (Alsophila pometaria); Spruce Budworm (Choristoneura fumiferana); Tent Caterpillar (Various Lasiocampidae); Thecla-Thecla basilides (Geyr) Thecla basilides); Tobacco Hornworm (Manduca sexta); Tobacco Moth (Ephestia elutella); Tufted Apple Budmoth (Platynota idaeusalis); Twig Borer (Anarsia lineatella); Variegated Cutworm (Peridroma saucia); Variegated Leafroller (Platynota flavedana); Velvetbean Caterpillar (Anticarsia gemmatalis); Walnut Caterpillar (Datana integerrima); Webworm (Hyphantria cunea); Western Tussock Moth (Orgyia vetusta); Southern Cornstalk Borer (Diatraea crambidoides); Corn Earworm; Sweet potato weevil; Pepper weevil; Citrus root weevil; Strawberry root weevil; Pecan weevil; Filbert weevil; Ricewater weevil; Alfalfa weevil; Clover weevil; Tea shot-hole borer; Root weevil; Sugarcane beetle; Coffee berry borer; Annual blue grass weevil (Listronotus maculicollis); Asiatic garden beetle (Maladera castanea); European chafer (Rhizotroqus majalis); Green June beetle (Cotinis nitida); Japanese beetle (Popillia japonica); May or June beetle (Phyllophaga sp.); Northern masked chafer (Cyclocephala borealis); Oriental beetle (Anomala orientalis); Southern masked chafer (Cyclocephala lurida); Billbug (Curculionoidea); Aedes aegypti; Busseola fusca; Chilo suppressalis; Culex pipiens; Culex quinquefasciatus; Diabrotica virgifera; Diatraea saccharalis; Helicoverpa armigera; Helicoverpa zea; Heliothis virescens; Leptinotarsa decemlineata; Ostrinia furnacalis; Ostrinia nubilalis; Pectinophora gossypiella; Plodia interpunctella; Plutella xylostella; Pseudoplusia includens; Spodoptera exigua; Spodoptera frugiperda; Spodoptera littoralis; Trichoplusia ni; or Xanthogaleruca luteola.

[1156] In some embodiments, the compositions, mixtures, and/or methods of the present invention can be applied to the locus of an insect and/or pest that is resistant or at least partially resistant to one or more insecticides, wherein said insect and/or pest is an adult beetle selected from the group consisting of: Asiatic garden beetle (Maladera castanea); Gold spotted oak borer (Agrilus coxalis auroguttatus); Green June beetle (Cotinis nitida); Japanese beetle (Popillia japonica); May or June beetle (Phyllophaga sp.); Oriental beetle (Anomala orientalis); and Soap berry-borer (Agrilus prionurus).

[1157] In some embodiments, the compositions, mixtures, and/or methods of the present invention can be applied to the locus of an insect and/or pest that is resistant or at least partially resistant to one or more insecticides, wherein said insect and/or pest is a larvae (annual white grub) selected from the group consisting of: Annual blue grass weevil (Listronotus maculicollis); Asiatic garden beetle (Maladera castanea); European chafer (Rhizotroqus majalis); Green June beetle (Cotinis nitida); Japanese beetle (Popillia japonica); May or June beetle (Phyllophaga sp.); Northern masked chafer (Cyclocephala borealis); Oriental beetle (Anomala orientalis); Southern masked chafer (Cyclocephala lurida); and Billbug (Curculionoidea).

[1158] Bt-Toxin-Resistant Pests

[1159] In some embodiments, an insect and/or pest may be resistant or at least partially resistant to one or more insecticides, for example, one or more Bt toxins. An exemplary description of Bt toxins is disclosed in Adang et al., (2014) Diversity of Bacillus thuringiensis crystal toxins and mechanism of action. In: Dhadialla, Tarlochan and Gill, Sarjeet (eds.) Insect Midgut and Insecticidal Proteins. Advances in Insect Physiology, 47. Academic Press, pp. 39-87; and PCT Application No. WO2009076475, the disclosures of which are incorporated herein by reference in their entirety.

[1160] In some embodiments, an insect and/or pest may be resistant or at least partially resistant to one or more Bt toxins as described herein.

[1161] In some embodiments, an insect and/or pest may be resistant or at least partially resistant to a Bt toxin. For example, in some embodiments, an insect and/or pest may be resistant or at least partially resistant to a Bacillus thuringiensis toxin; Bacillus thuringiensis Cry11Aa protein; Bacillus thuringiensis Cry11Ba protein; Bacillus thuringiensis Cry1Ac protein; Bacillus thuringiensis Cry1A.105 protein; Bacillus thuringiensis Cry1Aa protein; Bacillus thuringiensis Cry1Ab protein; Bacillus thuringiensis Cry1Da protein; Bacillus thuringiensis Cry1F protein; Bacillus thuringiensis Cry2A protein; Bacillus thuringiensis Cry2Ab protein; Bacillus thuringiensis Cry2Ab2 protein; Bacillus thuringiensis Cry2Ae protein; Bacillus thuringiensis Cry4Aa protein; Bacillus thuringiensis Cry4B protein; Bacillus thuringiensis CryIAa protein; Bacillus thuringiensis crystal CryIC protein; Bacillus thuringiensis CryIJa protein; Bacillus thuringiensis HD73 spore/crystal protein; Bacillus thuringiensis var. kurstaki HD-1 protein; Bacillus thuringiensis var. tenebrionenis protein; Bacillus thuringiensis var. aizawai protein; Bacillus thuringiensis var. aizawai ATTC SD-1372 protein; Bacillus thuringiensis var. israelensis protein; Bacillus thuringiensis var. kurstaki protein; Bacillus thuringiensis var. kurstaki (Dipel) protein; Bacillus thuringiensis var. kurstaki (Javelin) protein; Bacillus thuringiensis Vip3A protein; Cry1A. 105 protein; Cry1Ah protein; Cry1Ba protein; Cry1C protein; Cry1Ca protein; Cry1Ie protein; Cry2Aa protein; Cry3Bb1 protein; Cry4Ba protein; or CryIIB protein.

[1162] In some embodiments, an insect and/or pest that may be resistant or at least partially resistant to a Bt toxin can be selected from the following orders: Culicidae diptera; Chrysomelidae coleoptera; Pyralidae lepidoptera; Gelechiidae lepidoptera; Pyralidae lepidoptera; Plutellidae lepidoptera; or Noctuidae lepidoptera.

[1163] In some embodiments, an insect and/or pest that may be resistant or at least partially resistant to a Bt toxin can be selected from the following species: Aedes aegypti, Busseola fusca; Chilo suppressalis; Culex pipiens; Culex quinquefasciatus; Diabrotica virgifera; Diatraea saccharalis; Helicoverpa armigera; Helicoverpa zea; Heliothis virescens; Leptinotarsa decemlineata; Ostrinia furnacalis; Ostrinia nubilalis; Pectinophora gossypiella; Plodia interpunctella; Plutella xylostella; Pseudoplusia includens; Spodoptera exigua; Spodoptera frugiperda; Spodoptera littoralis; Trichoplusia ni; and Xanthogaleruca luteola.

### EXAMPLES

### Example 1

[1164] Combinations of Bti Toxin and U+2-ACTX-Hv1a

[1165] To test the effect of combining Bacillus thuringiensis var. israelensis toxins (Bti toxin) with U+2-ACTX-Hv1a, the following experiments were performed: first, an arena was established that consisted of a 59 mL cup that contained 30 mL of water. In each cup, third instar mosquito larvae (N=10) were added. No food was provided. Next, the given treatment solution was added to cup, and the cup was sealed with a lid. The cups were then placed on a tray under fluorescent grow lights. Three replicates were provided for each treatment.

[1166] The treatments comprised (1) U+2-ACTX-Hv1a with Bti toxin; (2) Bti toxin alone; (3) U+2-ACTX-Hv1a alone; and (4) water (as an untreated control).

[1167] To evaluate Bti toxin, AQUABAC XT® from Becker Microbial Products, Inc. was used. AQUABAC XT® consists of the following ingredients: 6-10% (˜8%) Bacillus thuringiensis ssp. israelensis Strain BMP 144 solids, spores & insecticidal toxins, wherein said insecticidal toxins are δ-endotoxins, and equivalent to 1,200 International Toxic Units (ITU/mg) (4.84 Billion ITU/gallon or 1.2 Billion ITU/Liter); and ˜92% other/inactive ingredients.

[1168] AQUABAC XT® consisting of Bacillus thuringiensis ssp. israelensis Strain BMP 144 solids, spores and insecticidal toxins, is commercially available from Becker Microbial Products, Inc., 11146 N.W. 69th Place, Parkland, Fla. 33076, U.S.A.; website: https://beckermicrobialproductsinc.com/; product code: 27376; EPA Reg. No. 62637-1.

[1169] U+2-ACTX-Hv1a having an amino acid sequence of “GSQYCVPVDQPCSLNTQPCCDDATCTQERNENGHTVYYCRA” (SEQ ID NO: 5) was obtained according to the methods described herein.

[1170] Each treatment was tested nine times (N=9). Here, the amount of Bti toxin used 0.25 μg/mL or 0.25 ppm. The amount of U+2-ACTX-Hv1a used in this example was 1 mg/mL.

[1171] After 24 hours, the combination of U+2-ACTX-Hv1a with Bti toxin resulted in a surprising effect corresponding to 95% mortality. Alternatively, Bti toxin alone only resulted in 57% mortality, and U+2-ACTX-Hv1a alone only resulted in 4% mortality. Accordingly, the combination of U+2-ACTX-Hv1a with Bti toxin resulted in an insecticidal effect. FIG. 23.

### Example 2

[1172] Foliar Spray Bioassay: Combination of Btk Toxin with Γ-CNTX-Pn1a

[1173] The effect of combining Bacillus thuringiensis var. kurstaki toxin (Btk toxin) with Γ-CNTX-Pn1a was tested against the lepidopteran species, beet armyworm (Spodoptera exigua). Mortality of the beet armyworm was assessed when confronting the insect with either (1) Γ-CNTX-Pn1a alone; (2) Btk toxin alone; (3) a combination of Γ-CNTX-Pn1a and Btk toxin; or (4) a control (0.125% Vintre, a surfactant).

[1174] To evaluate Btk toxin, BioProtec Plus™ from AEF Global Inc. was used. BioProtec Plus™ consists of 14.49% Bacillus thuringiensis ssp. kurstaki strain EVB-113-19 fermentation solids, spores, and insecticidal toxins with a potency of 17,500 Cabbage Looper Units (CLU) per mg of product (equivalent to 76 billion CLU per gallon of product); and 85.51% other/inactive ingredients.

[1175] BioProtec Plus™ consisting of 14.49% Bacillus thuringiensis ssp. kurstaki strain EVB-113-19 fermentation solids, spores, and insecticidal toxins, is commercially available from AEF Global Inc., 925 des calfats, US-QC, Levis, G6Y9E8, Canada; website: http://www.aefglobal.com/en/; CAS number: 68038-71-1; lot number: 31G18.

[1176] Γ-CNTX-Pn1a having an amino acid sequence of “GSCADINGACKSDCDCCGDSVTCDCYWSDSCKCRESNFKIGMAIRKKFC” (SEQ ID NO: 1778) was obtained using ion exchange chromatography, and according to the methods described herein.

[1177] To test the effect of the combinations, romaine lettuce was cut into 30 mm diameter disks, and then sterilized using a 140 ppm bleach solution; the disks were then triple rinsed. The romaine lettuce disks were then pinned to a Styrofoam board and sprayed with a given treatment; the disks were flipped, sprayed again, allowed to dry, and placed in the arena.

[1178] The arena was 32-well rearing tray containing 5 mL of 1% agar per well. One romaine lettuce disk was placed in each well, with a single second instar beet armyworm per leaf disk. The trays were then placed in a 28° C. incubator. Each treatment was tested on 12 disks, with three replicates (N=36).

[1179] First, a sublethal dose (i.e., a dose resulting in approximately 20% of the population being killed, or ˜LD₂₀) of Btk toxin was determined, to allow the observation of insecticidal peptides when combined with Btk toxin, and subsequently allow the observation of insecticidal activity between the two products.

[1180] Here, the sublethal does of Btk toxin was 736 ppm (0.736 mg/mL), which resulted in the death of 25% of the population. FIG. 24. Once the sublethal dose of Btk toxin was identified, the dose of Γ-CNTX-Pn1a was increased until the LD₅₀ amount was reached for the Γ-CNTX-Pn1a+Btk toxin combination.

[1181] As shown in FIG. 24, the use of 1.6 mg/mL of Γ-CNTX-Pn1a resulted in 6% mortality; however, when combined with 0.736 mg/mL of Btk toxin, the mortality jumped to 28%. Likewise, 6.75 mg/mL of Γ-CNTX-Pn1a caused a mortality rate of 3%; but, when combined with 0.736 mg/mL of Btk toxin, the mortality rate was 50%. This example demonstrates that a combination of Btk toxin and Γ-CNTX-Pn1a results in an insecticidal effect.

### Example 3

[1182] Foliar Spray Bioassay: Combination of Btk Toxin with AVPs

[1183] The effect of combining Btk toxin with Av3b-Variant Polypeptides (AVPs) was tested against the lepidopteran species, beet armyworm (Spodoptera exigua). Mortality of the beet armyworm was assessed when confronting the insect with either (1) AVP alone; (2) Btk toxin alone; (3) a combination of both AVP and Btk toxin; or (4) a control (0.125% Vintre, a surfactant).

[1184] To evaluate Btk toxin, BioProtec Plus™ from AEF Global Inc. was used. BioProtec Plus™ consists of 14.49% Bacillus thuringiensis ssp. kurstaki strain EVB-113-19 fermentation solids, spores, and insecticidal toxins with a potency of 17,500 Cabbage Looper Units (CLU) per mg of product (equivalent to 76 billion CLU per gallon of product); and 85.51% other/inactive ingredients.

[1185] BioProtec Plus™ consisting of 14.49% Bacillus thuringiensis ssp. kurstaki strain EVB-113-19 fermentation solids, spores, and insecticidal toxins, is commercially available from AEF Global Inc., 925 des calfats, US-QC, Levis, G6Y9E8, Canada; website: http://www.aefglobal.com/en/; CAS number: 68038-71-1; lot number: 31G18.

[1186] The Av3-variant polypeptide (AVPs) evaluated has an amino acid sequence of “KSCCPCYWGGCPWGQNCYPEGCSGPK” (SEQ ID NO: 1782), and was obtained using the methods described herein. Briefly, the AVP was obtained by first generating an AVP peptide expression vector was generated based on the pKLAC1 yeast expression vector (available from NEW ENGLAND BIOLABS®): AVPs were expressed as a secretion peptide with acetamidase gene expression as the selection marker. The expression vector of pLB102 was linearized by the digestion with the restriction enzyme SacII; the linear pLB102 plasmid was then transformed into K. lactis cell by electroporation; 96 of resulting positive transformation colonies were cultured. Seed culture of the production strain for inoculation of the 2 L fermentation was preceded for 24 hours in the seed medium containing 3% solulys 095K+3% glucose and 50 μg/mL Kanamycin. Then 30 mL seed culture was used to inoculate 2 L fermentation tank with 1 L batch medium containing 1 L basal salt media (BMS (g/L): Solulys 095K 40, suppressor 3519 0.1 mL, 85% phosphoric acid 13 mL, CaSO₄ 0.5, K₂SO₄ 9.1, MgSO₄.7H₂O 7.5, KOH 2.1, (NH₄)₂SO₄ 5, Dextrose 10) with 1.2% Pichia Trace metals (PTM (g/L): CuSO₄.5H₂O 6, NaI 0.08, MgSO₄.H₂O 3, NaMoO₄.2H₂O 0.2, H₃BO₃ 0.02, CoCl₂.6H₂O 0.5, ZnCl₂ 20, FeSO₄.6H₂O 65, H₂SO₄ 5 mL) and 2 mL 5% suppressor 7153. Batch phase of fermentation continued for 6 hours with controlled temperature at 27° C., pH 4.80 and dissolved oxygen at 15%. After 6 hour batch fermentation, temperature was dropped to 23.5° C. and feeding of sugar alcohol started and continued for 120 hours with temperature control at 23.5 C.° for the rest of fermentation process. Feed media was fed at a gradually increased rates: 3.4 mL/hr. for 24 hours, 4.4 mL/hr. for 30 hours, 7.2 mL/hr. for 24 hours, 8.8 mL/hr. for 12 hours and 11 mL/hr. until feed medium was totally consumed. Reverse-phase HPLC was used to purify AVP from the fermentation beer (i.e., spent medium) via monolithic C18 columns using water with 0.1% Trifloroacetic acid, and acetonitrile as the mobile phase. An elution protocol using 20-40% acetonitrile was used for AVP purification, in which AVP was eluted between a range of 34-36% acetonitrile.

[1187] An exemplary method of obtaining AVPs is disclosed in PCT Application No. PCT/US2019/051093, the disclosure of which is incorporated herein by reference in its entirety.

[1188] To test the effect of the combinations, romaine lettuce was cut into 30 mm diameter disks, and then sterilized using a 140 ppm bleach solution; the disks were then triple rinsed. The romaine lettuce disks were then pinned to a Styrofoam board and sprayed with a given treatment; the disks were flipped, sprayed again, allowed to dry, and placed in the arena.

[1189] The arena was 32-well rearing tray containing 5 mL of 1% agar per well. One romaine lettuce disk was placed in each well, with a single second instar beet armyworm per leaf disk. The trays were then placed in a 28° C. incubator. Each treatment was tested on 12 disks, with three replicates (N=36).

[1190] First, a sublethal dose (i.e., a dose resulting in approximately 20% of the population being killed, or ˜LD₂₀) of Btk toxin was determined, to allow the observation of insecticidal peptides when combined with Btk toxin, and subsequently allow the observation of insecticidal activity between the two products.

[1191] Here, the sublethal does of Btk toxin was 800 ppm (0.8 mg/mL), which resulted in the death of 31% of the population. FIG. 25. Once the sublethal dose of Btk toxin was identified for these experiments, the dose of AVP was increased until the LD₅₀ amount was reached for the AVP+Btk toxin combination.

[1192] As shown in FIG. 25, the use of 1.1 mg/mL of AVP resulted in 5% mortality; however, when combined with 0.8 mg/mL of Btk toxin, the mortality rate increased to 50%. Similarly, when using AVP alone at a dose of 3 mg/mL, the mortality rate was 11%; however, when combined with 0.8 mg/mL of Btk toxin, the mortality rate increased to 67%. Finally, using a dose of 9 mg/mL of AVP alone resulted in a 10% mortality rate, but, when combined with Btk toxin, the mortality rate was 88%. This example demonstrates that a combination of Btk toxin and AVP results in an insecticidal effect.

### Example 4

[1193] Diet Incorporation Assay: Combination of Btt Toxin with U+2-ACTX-Hv1a

[1194] The darkling beetle, Alphitobius diaperinus (of the order Coleoptera: family Tenebrionidae), also known as the lesser mealworm in its larval stages, is a serious pest in poultry houses. The larvae of the beetle eat chicken food, manure, and carcasses on the floor. Additionally, larvae are a vector of diseases when eaten by the chickens. And, the larvae burrow into Styrofoam insulation, reducing thermal efficiency of buildings.

[1195] The effect of the dietary incorporation of a combination of Bacillus thuringiensis var. tenebrionis toxins (Btt toxin) with U+2-ACTX-Hv1a was tested against the Coleopteran species, darkling deetle (Alphitobius diaperinus). Mortality of darkling beetles were assessed after the incorporation of one of the following treatments into the insect's diet: (1) U+2-ACTX-Hv1a alone; (2) Btt toxin alone; (3) a combination of both U+2-ACTX-Hv1a and Btt toxin; or (4) an untreated control (water).

[1196] To evaluate Btt toxin, NOVODOR® FC from VALENT® U.S.A. LLC Agricultural Products was used. NOVODOR® FC (or flowable concentrate) consists of 10% Bacillus thuringiensis ssp. tenebrionis strain NB-176 fermentation solids and solubles, with a potency of 15,000 Leptinotarsa Units (LTU) per gram of product (equivalent to 16.3 Million LTU's per quart of product); and 90% other/inactive ingredients.

[1197] NOVODOR® FC consisting of Bacillus thuringiensis ssp. tenebrionis strain NB-176 fermentation solids and solubles, is commercially available from VALENT® U.S.A. LLC Agricultural Products, 1333 N California Blvd, Suite 600, US-CA, Walnut Creek, 94596-8025, U.S.A., website: https://www.valent.com/; product code number: 96017; list number: 60220; lot number: 235-222-3L-00.

[1198] U+2-ACTX-Hv1a having an amino acid sequence of “GSQYCVPVDQPCSLNTQPCCDDATCTQERNENGHTVYYCRA” (SEQ ID NO: 5) was obtained according to the methods described herein.

[1199] To test the effect of the combinations, an arena was created comprising a 128 well bioassay tray, into which two (N=2), first-instar lesser mealworms were added (i.e., 2 mealworms per well). The mealworms were then provided a meal consisting of Southern Corn Rootworm (SCR) diet (Frontier Scientific, Newark, Del. 19713, product No. F9800B) mixed with one of the treatments. The meal consisted of 1 mL of agar-based SCR diet, mixed with one of the treatments. Stock meal mixtures were made by combining 15 mL of SCR diet held at 65° C. with 10 mL of 2.5× treatment solution. The wells were then secured with vented lid, and the tray was placed in an incubator with the following environmental conditions: 32° C.; 50-70% relative humidity; and no lights. Four replicates for each treatment condition were completed (N=4).

[1200] Next, a sublethal dose (i.e., a dose resulting in approximately 20% of the population being killed, or ˜LD₂₀) of Btt toxin was determined, to allow the observation of insecticidal peptides when combined with Btt toxin, and subsequently allow the observation of insecticidal activity between the two products.

[1201] Here, the sublethal does of Btt toxin was 400 ppm (0.4 mg/mL), which resulted in the death of 18% of the population. FIG. 26. Once the sublethal dose of Btt toxin was identified for these experiments, the dose of U+2-ACTX-Hv1a was increased until the LD₅₀ amount was reached for the U+2-ACTX-Hv1a+Btt toxin combination.

[1202] As shown in FIG. 26, the use of 1 mg/mL of U+2-ACTX-Hv1a alone resulted in 20% mortality; however, when combined with 0.4 mg/mL of Btt toxin, the mortality rate increased to 50%. Likewise, when using U+2-ACTX-Hv1a alone at a dose of 3 mg/mL, the mortality rate was 44%; however, when combined with 0.4 mg/mL of Btt toxin, the mortality rate increased to 91%. Finally, using a dose of 8 mg/mL of U+2-ACTX-Hv1a alone resulted in a 74% mortality rate. However, when 8.0 mg/mL of U+2-ACTX-Hv1a was combined with 0.4 mg/mL of Btt toxin, the mortality rate increased to 95%. This example demonstrates that a combination of Btt toxin and U+2-ACTX-Hv1a results in an insecticidal effect.

### Example 5

[1203] Spray Assay: Combination of Btt Toxin with U+2-ACTX-Hv1a

[1204] A spray assay was performed in order to determine the effect of using a spray containing Btt toxin with U+2-ACTX-Hv1a on Colorado potato beetle (Leptinotarsa decemlineata) mortality.

[1205] Approximately 16 first-instar Colorado potato beetles were placed on filter paper (Whatman #3, 90 mm diameter), contained in an inverted petri dish (25×100 mm). Next a mini-spray bottle (Qosmedix) was used to spray the Colorado potato beetles with 2 mL of treatment solution containing the following: water; 10 ppT (0.01 mg/mL of U+2-ACTX-Hv1a; and 20 ppT (0.02 mg/mL) of Btt toxin. The petri dish was then sealed with parafilm, and stored in the incubator (28° C.; 50% relative humidity; lights on) for 4 hours. Beetles were sprayed with (1) U+2-ACTX-Hv1a alone; (2) Btt toxin alone; (3) a combination of both U+2-ACTX-Hv1a and Btt toxin; or (4) an untreated control (water).

[1206] To evaluate Btt toxin, NOVODOR® FC from VALENT® U.S.A. LLC Agricultural Products was used. NOVODOR® FC (or flowable concentrate) consists of 10% Bacillus thuringiensis ssp. tenebrionis strain NB-176 fermentation solids and solubles, with a potency of 15,000 Leptinotarsa Units (LTU) per gram of product (equivalent to 16.3 Million LTU's per quart of product); and 90% other/inactive ingredients.

[1207] NOVODOR® FC consisting of Bacillus thuringiensis ssp. tenebrionis strain NB-176 fermentation solids and solubles, is commercially available from VALENT® U.S.A. LLC Agricultural Products, 1333 N California Blvd, Suite 600, US-CA, Walnut Creek, 94596-8025, U.S.A., website: https://www.valent.com/; product code number: 96017; list number: 60220; lot number: 235-222-3L-00.

[1208] U+2-ACTX-Hv1a having an amino acid sequence of “GSQYCVPVDQPCSLNTQPCCDDATCTQERNENGHTVYYCRA” (SEQ ID NO: 5) was obtained according to the methods described herein.

[1209] Following the spray treatment, individual beetles were transferred to the wells of a rearing tray, where they were provided 1 mL per well of an artificial Colorado potato beetle diet (Frontier Scientific, Newark, Del. 19713, product No. F9380B) with formaldehyde. Mortality rates were measured every 24 hours for the next 4 days.

[1210] As shown in FIG. 27, after 24 hours (1 day) beetles treated with U+2-ACTX-Hv1a alone had a 4% mortality rate. Beetles treated with Btt toxin alone possessed a 2% mortality rate. In stark contrast to the mortality rates of either U+2-ACTX-Hv1a or Btt toxin alone, combining U+2-ACTX-Hv1a with Btt toxin resulted in a 79% mortality rate after 24 hours. This pattern of insecticidal activity continued at subsequent time points. At 48 hours (2 days), beetles treated with U+2-ACTX-Hv1a alone possessed a 9% mortality rate. Beetles treated with Btt toxin alone possessed a 6% mortality rate. By combining U+2-ACTX-Hv1a with Btt toxin, the mortality rate increased to 81% at 48 hours. At 72 hours (3 days), beetles treated with U+2-ACTX-Hv1a alone possessed a 7% mortality rate. Beetles treated with Btt toxin alone possessed a 23% mortality rate. By combining U+2-ACTX-Hv1a with Btt toxin, the mortality rate increased to 94% at 72 hours. Finally, at 96 hours (4 days), beetles treated with U+2-ACTX-Hv1a alone possessed a 19% mortality rate. Beetles treated with Btt toxin alone possessed a 68% mortality rate. By combining U+2-ACTX-Hv1a with Btt toxin, the mortality rate increased to 91% at 96 hours.

The application's sequence listing, which the Patent Office published only in electronic form, follows.

SEQUENCE LISTING (1782 sequences)

SEQ ID NO: 1 - protein, 4 aa, Pisum sativum
IGER

SEQ ID NO: 2 - protein, 5 aa, Nicotiana attenuata
EEKKN

SEQ ID NO: 3 - protein, 8 aa, Nicotiana tabacum
ETMFKHGL

SEQ ID NO: 4 - protein, 24 aa, Hordeum vulgare
MANKHLSLSLFLVLLGLSASLASG

SEQ ID NO: 5 - protein, 41 aa, Hadronyche versuta
GSQYCVPVDQPCSLNTQPCCDDATCTQERNENGHTVYYCRA

SEQ ID NO: 6 - protein, 39 aa, Hadronyche versuta
QYCVPVDQPCSLNTQPCCDDATCTQELNENANPVYYCRA

SEQ ID NO: 7 - protein, 238 aa, Aequorea victoria
ASKGEELFTGVVPILVELDGDVNGHKFSVSGEGEGDATYGKLTLKFICTTGKLPVPWPTLVTTFSYGVQCFSRYPDHMKRHDFFKSAMPEGYVQERTISFKDDGNYKTRAEVKFEGDTLVNRIELKGIDFKEDGNILGHKLEYNYNSHNVYITADKQKNGIKANFKIRHNIEDGSVQLADHYQQNTPIGDGPVLLPDNHYLSTQSALSKDPNEKRDHMVLLEFVTAAGITHGMDELYK

SEQ ID NO: 8 - protein, 38 aa, Hadronyche versuta
MSPTCIPSGQPCPYNENCCSQSCTFKENENGNTVKRCD

SEQ ID NO: 9 - protein, 61 aa, Hadronyche versuta
MANKHLSLSLFLVLLGLSASLASGSPTCIPSGQPCPYNENCCSQSCTFKENENGNTVKRCD

SEQ ID NO: 10 - protein, 282 aa, Hadronyche versuta
MASKGEELFTGVVPILVELDGDVNGHKFSVSGEGEGDATYGKLTLKFICTTGKLPVPWPTLVTTFSYGVQCFSRYPDHMKRHDFFKSAMPEGYVQERTISFKDDGNYKTRAEVKFEGDTLVNRIELKGIDFKEDGNILGHKLEYNYNSHNVYITADKQKNGIKANFKIRHNIEDGSVQLADHYQQNTPIGDGPVLLPDNHYLSTQSALSKDPNEKRDHMVLLEFVTAAGITHGMDELYKIGERQYCVPVDQPCSLNTQPCCDDATCTQERNENGHTVYYCRA

SEQ ID NO: 11 - protein, 305 aa, Hadronyche versuta
MANKHLSLSLFLVLLGLSASLASGASKGEELFTGVVPILVELDGDVNGHKFSVSGEGEGDATYGKLTLKFICTTGKLPVPWPTLVTTFSYGVQCFSRYPDHMKRHDFFKSAMPEGYVQERTISFKDDGNYKTRAEVKFEGDTLVNRIELKGIDFKEDGNILGHKLEYNYNSHNVYITADKQKNGIKANFKIRHNIEDGSVQLADHYQQNTPIGDGPVLLPDNHYLSTQSALSKDPNEKRDHMVLLEFVTAAGITHGMDELYKIGERQYCVPVDQPCSLNTQPCCDDATCTQERNENGHTVYYCRA

SEQ ID NO: 12 - protein, 39 aa, Hadronyche versuta
QYCVPVDQPCSLNTQPCCDDATCTQERNENGHTVYYCRA

SEQ ID NO: 13 - protein, 239 aa, Aequorea victoria
MASKGEELFTGVVPILVELDGDVNGHKFSVSGEGEGDATYGKLTLKFICTTGKLPVPWPTLVTTFSYGVQCFSRYPDHMKRHDFFKSAMPEGYVQERTISFKDDGNYKTRAEVKFEGDTLVNRIELKGIDFKEDGNILGHKLEYNYNSHNVYITADKQKNGIKANFKIRHNIEDGSVQLADHYQQNTPIGDGPVLLPDNHYLSTQSALSKDPNEKRDHMVLLEFVTAAGITHGMDELYK

SEQ ID NO: 14 - DNA, 932 bp, Agrobacterium tumefaciens
ttaattaaatggctaataaacacctgagtttgtcactattcctcgtgttgctcgggttatctgcttcacttgcaagcggagctagcaaaggagaagaacttttcactggagttgtcccaattcttgttgaattagatggtgatgttaatgggcacaaattttctgtcagtggagagggtgaaggtgatgctacatacggaaagcttacccttaaatttatttgcactactggaaaactacctgttccatggccaacacttgtcactactttctcttatggtgttcaatgcttttcccgttatccggatcatatgaaacggcatgactttttcaagagtgccatgcccgaaggttatgtacaggaacgcactatatctttcaaagatgacgggaactacaagacgcgtgctgaagtcaagtttgaaggtgatacccttgttaatcgtatcgagttaaaaggtattgattttaaagaagatggaaacattctcggacacaaactcgagtacaactataactcacacaatgtatacatcacggcagacaaacaaaagaatggaatcaaagctaacttcaaaattcgccacaacattgaagatggatccgttcaactagcagaccattatcaacaaaatactccaattggcgatggccctgtccttttaccagacaaccattacctgtcgacacaatctgccctttcgaaagatcccaacgaaaagcgtgaccacatggtccttcttgagtttgtaactgctgctgggattacacatggcatggatgagctctacaaaattggtgaaagacaatattgtgttccagttgatcaaccatgttctcttaatactcaaccatgttgtgatgatgctacttgtactcaagaaagaaatgaaaatggacatactgtttattattgtagagcttaacctagg

SEQ ID NO: 15 - DNA, 849 bp, Nicotiana benthamiana
atggctagcaaaggagaagaacttttcactggagttgtcccaattcttgttgaattagatggtgatgttaatgggcacaaattttctgtcagtggagagggtgaaggtgatgctacatacggaaagcttacccttaaatttatttgcactactggaaaactacctgttccatggccaacacttgtcactactttctcttatggtgttcaatgcttttcccgttatccggatcatatgaaacggcatgactttttcaagagtgccatgcccgaaggttatgtacaggaacgcactatatctttcaaagatgacgggaactacaagacgcgtgctgaagtcaagtttgaaggtgatacccttgttaatcgtatcgagttaaaaggtattgattttaaagaagatggaaacattctcggacacaaactcgagtacaactataactcacacaatgtatacatcacggcagacaaacaaaagaatggaatcaaagctaacttcaaaattcgccacaacattgaagatggatccgttcaactagcagaccattatcaacaaaatactccaattggcgatggccctgtccttttaccagacaaccattacctgtcgacacaatctgccctttcgaaagatcccaacgaaaagcgtgaccacatggtccttcttgagtttgtaactgctgctgggattacacatggcatggatgagctctacaaaattggtgaaagacaatattgtgttccagttgatcaaccatgttctcttaatactcaaccatgttgtgatgatgctacttgtactcaagaaagaaatgaaaatggacatactgtttattattgtagagcttaa

SEQ ID NO: 16 - protein, 4 aa, Nicotiana benthamiana
KDEL

SEQ ID NO: 17 - DNA, 930 bp, Nicotiana benthamiana
atggctaataaacacctgagtttgtcactattcctcgtgttgctcgggttatctgcttcacttgcaagcggagctagcaaaggagaagaacttttcactggagttgtcccaattcttgttgaattagatggtgatgttaatgggcacaaattttctgtcagtggagagggtgaaggtgatgctacatacggaaagcttacccttaaatttatttgcactactggaaaactacctgttccatggccaacacttgtcactactttctcttatggtgttcaatgcttttcccgttatccggatcatatgaaacggcatgactttttcaagagtgccatgcccgaaggttatgtacaggaacgcactatatctttcaaagatgacgggaactacaagacgcgtgctgaagtcaagtttgaaggtgatacccttgttaatcgtatcgagttaaaaggtattgattttaaagaagatggaaacattctcggacacaaactcgagtacaactataactcacacaatgtatacatcacggcagacaaacaaaagaatggaatcaaagctaacttcaaaattcgccacaacattgaagatggatccgttcaactagcagaccattatcaacaaaatactccaattggcgatggccctgtccttttaccagacaaccattacctgtcgacacaatctgccctttcgaaagatcccaacgaaaagcgtgaccacatggtccttcttgagtttgtaactgctgctgggattacacatggcatggatgagctctacaaaattggtgaaagacaatattgtgttccagttgatcaaccatgttctattaatactcaaccatgttgtgatgatgctacttgtactcaagaaagaaatgaaaatggacatactgtttattattgtagagctaaagatgagctctaa

SEQ ID NO: 18 - protein, 26 aa, Nicotiana benthamiana
MGKMASLFASLLVVLVSLSLASESSA

SEQ ID NO: 19 - protein, 26 aa, Nicotiana benthamiana
MGKMASLFATFLVVLVSLSLASESSA

SEQ ID NO: 20 - DNA, 78 bp, Nicotiana benthamiana
atgggtaagatggcttctctgtttgcttctctgctggttgttctggtttctctgtctctggcttctgaatcttctgct

SEQ ID NO: 21 - DNA, 938 bp, Nicotiana benthamiana
ttaattaaatgggtaagatggcttctctgtttgcttctctgctggttgttctggtttctctgtctctggcttctgaatcttctgctgctagcaaaggagaagaacttttcactggagttgtcccaattcttgttgaattagatggtgatgttaatgggcacaaattttctgtcagtggagagggtgaaggtgatgctacatacggaaagcttacccttaaatttatttgcactactggaaaactacctgttccatggccaacacttgtcactactttctcttatggtgttcaatgcttttcccgttatccggatcatatgaaacggcatgactttttcaagagtgccatgcccgaaggttatgtacaggaacgcactatatctttcaaagatgacgggaactacaagacgcgtgctgaagtcaagtttgaaggtgatacccttgttaatcgtatcgagttaaaaggtattgattttaaagaagatggaaacattctcggacacaaactcgagtacaactataactcacacaatgtatacatcacggcagacaaacaaaagaatggaatcaaagctaacttcaaaattcgccacaacattgaagatggatccgttcaactagcagaccattatcaacaaaatactccaattggcgatggccctgtccttttaccagacaaccattacctgtcgacacaatctgccctttcgaaagatcccaacgaaaagcgtgaccacatggtccttcttgagtttgtaactgctgctgggattacacatggcatggatgagctctacaaaattggtgaaagacaatattgtgttccagttgatcaaccatgttctcttaatactcaaccatgttgtgatgatgctacttgtactcaagaaagaaatgaaaatggacatactgtttattattgtagagcttaacctagg

SEQ ID NO: 22 - DNA, 78 bp, Nicotiana benthamiana
atgggtaagatggcttctctgtttgctacttttctggttgttctggtttctctgtctctggcttctgaatcttctgct

SEQ ID NO: 23 - DNA, 938 bp, Nicotiana benthamiana
ttaattaaatgggtaagatggcttctctgtttgctacttttctggttgttctggtttctctgtctctggcttctgaatcttctgctgctagcaaaggagaagaacttttcactggagttgtcccaattcttgttgaattagatggtgatgttaatgggcacaaattttctgtcagtggagagggtgaaggtgatgctacatacggaaagcttacccttaaatttatttgcactactggaaaactacctgttccatggccaacacttgtcactactttctcttatggtgttcaatgcttttcccgttatccggatcatatgaaacggcatgactttttcaagagtgccatgcccgaaggttatgtacaggaacgcactatatctttcaaagatgacgggaactacaagacgcgtgctgaagtcaagtttgaaggtgatacccttgttaatcgtatcgagttaaaaggtattgattttaaagaagatggaaacattctcggacacaaactcgagtacaactataactcacacaatgtatacatcacggcagacaaacaaaagaatggaatcaaagctaacttcaaaattcgccacaacattgaagatggatccgttcaactagcagaccattatcaacaaaatactccaattggcgatggccctgtccttttaccagacaaccattacctgtcgacacaatctgccctttcgaaagatcccaacgaaaagcgtgaccacatggtccttcttgagtttgtaactgctgctgggattacacatggcatggatgagctctacaaaattggtgaaagacaatattgtgttccagttgatcaaccatgttctcttaatactcaaccatgttgtgatgatgctacttgtactcaagaaagaaatgaaaatggacatactgtttattattgtagagcttaacctagg

SEQ ID NO: 24 - protein, 37 aa, Hadronyche versuta
SPTCIPSGQPCPYNENCCSQSCTFKENENGNTVKRCD

SEQ ID NO: 25 - protein, 224 aa, Juniperus ashei
MARVSELAFLLAATLAISLHMQEAGVVKFDIKNQCGYTVWAAGLPGGGKRLDQGQTWTVNLAAGTASARFWGRTGCTFDASGKGSCQTGDCGGQLSCTVSGAVPATLAEYTQSDQDYYDVSLVDGFNIPLAINPTNAQCTAPACKADINAVCPSELKVDGGCNSACNVFKTDQYCCRNAYVDNCPATNYSKIFKNQCPQAYSYAKDDTATFACASGTDYSIVFC

SEQ ID NO: 26 - protein, 197 aa, Juniperus ashei
KFDIKNQCGYTVWAAGLPGGGKRLDQGQTWTVNLAAGTASARFWGRTGCTFDASGKGSCQTGDCGGQLSCTVSGAVPATLAEYTQSDQDYYDVSLVDGFNIPLAINPTNAQCTAPACKADINAVCPSELKVDGGCNSACNVFKTDQYCCRNAYVDNCPATNYSKIFKNQCPQAYSYAKDDTATFACASGTDYSIVFC

SEQ ID NO: 27 - protein, 27 aa, Juniperus ashei
MARVSELAFLLAATLAISLHMQEAGVV

SEQ ID NO: 28 - protein, 105 aa, Galanthus nivalis
DNILYSGETLSTGEFLNYGSFVFIMQEDCNLVLYDVDKPIWATNTGGLSRSCFLSMQTDGNLVVYNPSNKPIWASNTGGQNGNYVCILQKDRNVVIYGTDRWATG

SEQ ID NO: 29 - protein, 29 aa, Kluyveromyces lactis
GSRSCCPCYWGGCPWGQNCYPEGCSGPKV

SEQ ID NO: 30 - protein, 27 aa, Kluyveromyces lactis
RSCCPCYWGGCPWGQNCYPEGCSGPKV

SEQ ID NO: 31 - DNA, 366 bp, Hordeum Vulgare
aagcttgaaaaaaatgaaattttccactattttagcagcatctacagctttaatcagtgttgtcatggctgcacctgtgagtaccgaaacagatatagacgaccttccaatctctgttccagaagaggctttgataggattcatcgatttgactggtgatgaagtttcattgttaccagtgaataatggtacccatactggtattttgttcctaaacaccacaattgctgaagctgcttttgcagataaggatgatttggagaaaagaggttctagatcatgctgcccttgttactggggtggttgtccatggggacaaaactgttatcctgaaggatgttctggtccaaaggtatgagcggccgc

SEQ ID NO: 32 - DNA, 360 bp, Anemonia Viridis
aagcttgaaaaaaatgaaattttccacaatcttagctgcaagtactgctcttatttctgttgtgatggctgctccagtatctaccgaaacagatatcgatgatttgccaatttcagtccctgaagaggcactaatcggattcattgacttaaccggtgatgaagtgagtttgttgccagttaacaacggtactcatacaggtatattgtttttgaataccactatagctgaagcagcattcgctgataaagatgacttagaaaagagaagatcatgctgcccttgttactggggtggttgtccatggggtcaaaattgttatccagagggttgttctggacctaaggtttgagcggccgc

SEQ ID NO: 33 - protein, 675 aa, Bacillus thuringiensis israelensis
MNPYQNKNEYEIFNAPSNGFSKSNNYSRYPLANKPNQPLKNTNYKDWLNVCQDNQQYGNNAGNFASSETIVGVSAGIIVVGTMLGAFAAPVLAAGIISFGTLLPIFWQGSDPANVWQDLLNIGGRPIQEIDKNIINVLTSIVTPIKNQLDKYQEFFDKWEPARTHANAKAVHDLFTTLEPIIDKDLDMLKNNASYRIPTLPAYAQIATWHLNLLKHAATYYNIWLQNQGINPSTFNSSNYYQGYLKRKIQEYTDYCIQTYNAGLTMIRTNTNATWNMYNTYRLEMTLTVLDLIAIFPNYDPEKYPIGVKSELIREVYTNVNSDTFRTITELENGLTRNPTLFTWINQGRFYTRNSRDILDPYDIFSFTGNQMAFTHTNDDRNIIWGAVHGNIISQDTSKVFPFYRNKPIDKVEIVRHREYSDIIYEMIFFSNSSEVFRYSSNSTIENNYKRTDSYMIPKQTWKNEEYGHTLSYIKTDNYIFSVVRERRRVAFSWTHTSVDFQNTIDLDNITQIHALKALKVSSDSKIVKGPGHTGGDLVILKDSMDFRVRFLKNVSRQYQVRIRYATNAPKTTVFLTGIDTISVELPSTTSRQNPNATDLTYADFGYVTFPRTVPNKTFEGEDTLLMTLYGTPNHSYNIYIDKIEFIPITQSVLDYTEKQNIEKTQKIVNDLFVN

SEQ ID NO: 34 - protein, 675 aa, Bacillus thuringiensis israelensis
MNPYQNKNEYEIFNAPSNGFSKSNNYSRYPLANKPNQPLKNTNYKDWLNVCQDNQQYGNNAGNFASSETIVGVSAGIIVVGTMLGAFAAPVLAAGIISFGTLLPIFWQGSDPANVWQDLLNIGGRPIQEIDKNIINVLTSIVTPIKNQLDKYQEFFDKWEPARTHANAKAVHDLFTTLEPIIDKDLDMLKNNASYRIPTLPAYAQIATWHLNLLKHAATYYNIWLQNQGINPSTFNSSNYYQGYLKRKIQEYTDYCIQTYNAGLTMIRTNTNATWNMYNTYRLEMTLTVLDLIAIFPNYDPEKYPIGVKSELIREVYTNVNSDTFRTITELENGLTRNPTLFTWINQGRFYTRNSRDILDPYDIFSFTGNQMAFTHTNDDRNIIWGAVHGNIISQDTSKVFPFYRNKPIDKVEIVRHREYSDIIYEMIFFSNSSEVFRYSSNSTIENNYKRTDSYMIPKQTWKNKEYGHTLSYIKTDNYIFSVVRERRRVAFSWTHTSVDFQNTIDLDNITQIHALKALKVSSDSKIVKGPGHTGGDLVILKDSMDFRVRFLKNVSRQYQVRIRYATNAPKTTVFLTGIDTISVELPSTTSRQNPNATDLTYADFGYVTFPRTVPNKTFEGEDTLLMTLYGTPNHSYNIYIDKIEFIPITQSVLDYTEKQNIEKTQKIVNDLFVN

SEQ ID NO: 35 - protein, 675 aa, Bacillus thuringiensis s. israelensis BRC-LLP29; identical to SEQ ID NO: 34

SEQ ID NO: 36 - protein, 643 aa, Bacillus thuringiensis israelensis
MEDSSLDTLSIVNETDFPLYNNYTEPTIAPALIAVAPIAQYLATAIGKWAAKAAFSKVLSLIFPGSQPATMEKVRTEVETLINQKLSQDRVNILNAEYRGIIEVSDVFDAYIKQPGFTPATAKGYFLNLSGAIIQRLPQFEVQTYEGVSIALFTQMCTLHLTLLKDGILAGSAWGFTQADVDSFIKLFNQKVLDYRTRLMRMYTEEFGRLCKVSLKDGLTFRNMCNLYVFPFAEAWSLMRYEGLKLQSSLSLWDYVGVSIPVNYNEWGGLVYKLLMGEVNQRLTTVKFNYSFTNEPADIPARENIRGVHPIYDPSSGLTGWIGNGRTNNFNFADNNGNEIMEVRTQTFYQNPNNEPIAPRDIINQILTAPAPADLFFKNADINVKFTQWFQSTLYGWNIKLGTQTVLSSRTGTIPPNYLAYDGYYIRAISACPRGVSLAYNHDLTTLTYNRIEYDSPTTENIIVGFAPDNTKDFYSKKSHYLSETNDSYVIPALQFAEVSDRSFLEDTPDQATDGSIKFARTFISNEAKYSIRLNTGFNTATRYKLIIRVRVPYRLPAGIRVQSQNSGNNRMLGSFTANANPEWVDFVTDAFTFNDLGITTSSTNALFSISSDSLNSGEEWYLSQLFLVKESAFTTQINPLLK

SEQ ID NO: 37 - protein, 78 aa, Bacillus thuringiensis israelensis
NSGNNRMLGSFTANANPEWVDFVTDAFTFNDLGITTSSTNALFSISSDSLNSGEEWYLSQLFLVKESAFTTQINPLLK

SEQ ID NO: 38 - protein, 643 aa, Bacillus thuringiensis israelensis; identical to SEQ ID NO: 36

SEQ ID NO: 39 - protein, 643 aa, Bacillus thuringiensis s. israelensis BRC-LLP29
MNYMEDSSLDTLSIVNETDFPLYNNYTEPTIAPALIAVAPIAQYLATAIGKWAAKAAFSKVLSLIFPGSQPATMEKVRTEVETLINQKLSQDRVNILNAEYRGIIEVSDVFDAYIKQPGFTPATAKGYFLNLSGAIIQRLPQFEVQTYEGVSIALFTQMCTLHLTLLKDGILAGSAWGFTQADVDSFIKLFNQKVLDYRTRLMRMYTEEFGRLCKVSLKDGLTFRNMCNLYVFPFAEAWSLMRYEGLKLQSSLSLWDYVGVSIPVNYNEWGGLVYKLLMGEVNQRLTTVKFNYSFTNEPADIPARENIRGVHPIYDPSSGLTGWIGNGRTNNFNFADNNGNEIMEVRTQTFYQNPNNEPIAPRDIINQILTAPAPADLFFKNADINVKFTQWFQSTLYGWNIKLGTQTVLSSRTGTIPPNYLAYDGYYIRAISACPRGVSLAYNHDLTTLTYNRIEYDSPTTENIIVGFAPDNTKDFYSKKSHYLSETNDSYVIPALQFAEVSDRSFLEDTPDQATDGSIKFARTFISNEAKYSIRLNTGFNTATRYKLIIRVRVPYRLPAGIRVQSQNSGNNRMLGSFTANANPEWVDFVTDAFTFNDLGITTSSTNALFSISSDSLNSGEEWYLSQLFLVKESAFTTQINP

SEQ ID NO: 40 - protein, 724 aa, Bacillus thuringiensis jegathesan 367
MQNNNFNTTEINNMINFPMYNGRLEPSLAPALIAVAPIAKYLATALAKWAVKQGFAKLKSEIFPGNTPATMDKVRIEVQTLLDQRLQDDRVKILEGEYKGIIDVSKVFTDYVNQSKFETGTANRLFFDTSNQLISRLPQFEIAGYEGVSISLFTQMCTFHLGLLKDGILAGSDWGFAPADKDALICQFNRFVNEYNTRLMVLYSKEFGRLLAKNLNEALNFRNMCSLYVFPFSEAWSLLRYEGTKLENTLSLWNFVGESINNISPNDWKGALYKLLMGAPNQRLNNVKFNYSYFSDTQATIHRENIHGVLPTYNGGPTITGWIGNGRFSGLSFPCSNELEITKIKQEITYNDKGGNFNSIVPAATRNEILTATVPTSADPFFKTADINWKYFSPGLYSGWNIKFDDTVTLKSRVPSIIPSNILKYDDYYIRAVSACPKGVSLAYNHDFLTLTYNKLEYDAPTTQNIIVGFSPDNTKSFYRSNSHYLSTTDDAYVIPALQFSTVSDRSFLEDTPDQATDGSIKFTDTVLGNEAKYSIRLNTGFNTATRYRLIIRFKAPARLAAGIRVRSQNSGNNKLLGGIPVEGNSGWIDYITDSFTFDDLGITTSSTNAFFSIDSDGVNASQQWYLSKLILVKESSFTTQIPLKPYVIVRCPDTFFVSNNSSSTYEQGYNNNYNQNSSSMYDQGYNNSYNPNSGCTCNQDYNNSYNQNSGCTCNQGYNNNYPK

SEQ ID NO: 41 - protein, 750 aa, Bacillus thuringiensis medellin
MENNSFNVLANNNMSSFPLFNSKIEPSIAPALIAVAPIAKYLATALAKWALKQGFAKLKSEIFPGNETATMEKVRLEVQTILNQTLQTDRVATLKAEYEGFIHLGKVFTDYVSQSTFTPATAKTHFLNMSNLLIQRLPQFEIAGYEGVSISLFTQMCTLHLGLLKDGILAGSDWGFTPEDKDSLICQFNRYVNEYNTRMMGLYSIEFGRLLAKNLNEALNFRNMCSLYVFPFSEAWYLLRYEGTKLENTLSLWNFVGEDIGGILHNDWKGALYKLLMGATNQRLANVRFNYSYFSDTQGTIHRENILGAHPTYNGEQTPTGWIGNGRLGRFSAPYSNELEITKVEQEITYNNKGDHSNSIVPANTRNEILTATVPITADPFFKTADINWRYFSQGLYYGWNIKFDDRVILNSRVPGGIPSNRLEYDGYYIRAVSACPRNVPLSYNHNYLTLTYNRLEYDAPTTQNIIVGFSPNNTKSFYARNSHYLSATNDAYVIPALQFATVSDRSFLEDTPDQATDGSIKFTETVLGNEAKYSIRLNTGFNTATRYRLVIRFKATARLAAGIRVRSQNSGNNRLLGGIPVEGNSGWVDYITDSFTFNDLGITTASTNAFFSIDSDGVNASQQWYLSKLILVKDFVNNSGFRNQVPLAPYVIARCPNTFFVSNNTSSGYEQGYNDNYNQNTSSGYEQGYNDNYNQNTSSGYEQGYNDNYNQNTSSGYEQGYNDNYNQNTSSGYEQGYNDNYNQNTSSGV

SEQ ID NO: 42 - protein, 792 aa, Bacillus thuringiensis K34
MENNSFNVLANNNMSSFPLFNSKIEPSIAPALIAVAPIAKYLATALAKWALKQGFAKLKSEIFPGNTPATMEKVRLEVQTLLNQTLQADRVAILNAEYQGFINLGKIFTDYVSQSTFTPATAKTHFLSMSNQLIQRLPQFEIAGYEGVSISLFTQMCTLHLGLLKDGILAGSDWGFTPEDKDSLICQFNRYVNEYNTRMMGLYSIEFGRLLAKNLNEALNFRNMCSLYVFPFSEAWYLLRYEGTKLENTLSLWNFVGEDIGGILHNDWKGALYKLLMGATNQRLANVRFNYSYFSDTQGTIHRENILGAHPTYNGEQTPTGWIGNGRLGRFSAPYSNELEITKVEQEITYNNKGDHSNSIVPANTRNEILTATVPITADPFFKTADINWRYFSQGLYYGWNIKFDDKVILNSRVPGGIPSNRLEYDGYYIRAVSACPRNVPLSYNHNYLTLTYNRLEYDAPTTQNIIVGFSPNNTKSFYARNSHYLSATDDAYVIPALQFATVSDRSFLEDTPDQATDGSIKFTETVLGNEAKYSIRLNTGFNTATRYRLVIRFKAPARLAAGIRVRSQNSGNNRLLGGIPVEGNSGWVDYITDSFTFNDLGITTASTNAFFSIDSDGVNASQQWYLSKLILVKDFVNNSGFRNQVPLAPYVITRCPNTFFVSNNTSSGYEQGYNDNYNQNTSSGYEQGYNDNYNQNTSSGYEQGYNDNYNQNTSSGYEQGYNDNYNQNTSSEYEQGYNDNYNQNTSSGYEQGYNDNYNQNTSSGYEQGYIDNYRPNTECKCGRRHNNYDHK

SEQ ID NO: 43 - protein, 1257 aa, Bacillus thuringiensis PS33F2
MATLNEVYPVNYNVLSSDAFQQLDTTGFKSKYDEMIKAFEKKWKKGAKGKDLLDVAWTYITTGEIDPLNVIKGVLSVLTLIPEVGTVASAASTIVSFIWPKIFGDKPNAKNIFEELKPQIEALIQQDITNYQDAINQKKFDSLQKTINLYTVAIDNNDYVTAKTQLENLNSILTSDISIFIPEGYETGGLPYYAMVANAHILLLRDAIVNAEKLGFSDKEVDTHKKYIKMTIHNHTEAVIKAFLNGLDKFKSLDVNSYNKKANYIKGMTEMVLDLVALWPTFDPDHYQKEVEIEFTRTISSPIYQPVPKNMQNTSSSIVPSDLFHYQGDLVKLEFSTRTDNDGLAKIFTGIRNTFYKSPNTHETYHVDFSYNTQSSGNISRGSSNPIPIDLNNPIISTCIRNSFYKAIAGSSVLVNFKDGTQGYAFAQAPTGGAWDHSFIESDGAPEGHKLNYIYTSPGDTLRDFINVYTLISTPTINELSTEKIKGFPAEKGYIKNQGIMKYYGKPEYINGAQPVNLENQQTLIFEFHASKTAQYTIRIRYASTQGTKGYFRLDNQELQTLNIPTSHNGYVTGNIGENYDLYTIGSYTITEGNHTLQIQHNDKNGMVLDRIEFVPKDSLQDSPQDSPPEVHESTIIFDKSSPTIWSSNKHSYSHIHLEGSYTSQGSYPHNLLINLFHPTDPNRNHTIHVNNGDMNVDYGKDSVADGLNFNKITATIPSDAWYSGTITSMHLFNDNNFKTITPKFELSNELENITTQVNALFASSAQDTLASNVSDYWIEQVVMKVDALSDEVFGKEKKALRKLVNQAKRLSKIRNLLIGGNFDNLVAWYMGKDVVKESDHELFKSDHVLLPPPTFHPSYIFQKVEESKLKPNTRYTISGFIAHGEDVELVVSRYGQEIQKVMQVPYEEALPLTSESNSSCCVPNLNINETLADPHFFSYSIDVGSLEMEANPGIEFGLRIVKPTGMARVSNLEIREDRPLTAKEIRQVQRAARDWKQNYEQERTEITAIIQPVLNQINALYENEDWNGSIRSNVSYHDLEQIMLPTLLKTEEINCNYDHPAFLLKVYHWFMTDRIGEHGTILARFQEALDRAYTQLESRNLLHNGHFTTDTANWTIEGDAHHTILEDGRRVLRLPDWSSNATQTIEIEDFDLDQEYQLLIHAKGKGSITLQHGEENEYVETHTHHTNDFITSQNIPFTFKGNQIEVHITSEDGEFLIDHITVIEVSKTDTNTNIIENSPINTSMNSNVRVDIPRSL

SEQ ID NO: 44 - protein, 803 aa, Bacillus thuringiensis PS63B
MTCQLQAQPLIPYNVLAGVPTSNTGSPIGNAGNQFDQFEQTVKELKEAWEAFQKNGSFSLAALEKGFDAAIGGGSFDYLGLVQAGLGLVGTLGAAIPGVSVAVPLISMLVGVFWPKGTNNQENLITVIDKEVQRILDEKLSDQLIKKLNADLNAFTDLVTRLEEVIIDATFENHKPVLQVSKSNYMKVDSAYFSTGGILTLGMSDFLTDTYSKLTFPLYVLGATMKLSAYHSYIQFGNTWLNKVYDLSSDEGKTMSQALARAKQHMRQDIAFYTSQALNMFTGNLPSLSSNKYAINDYNVYTRAMVLNGLDIVATWPTLYPDDYSSQIKLEKTRVIFSDMVGQSESRDGSVTIKNIFDNTDSHQHGSIGLNSISYFPDELQKAQLRMYDYNHKPYCTDCFCWPYGVILNYNKNTFRYGDNDPGLSGDVQLPAPMSVVNAQTQTAQYTDGENIWTDTGRSWLCTLRGYCTTNCFPGRGCYNNSTGYGESCNQSLPGQKIHALYPFTQTNVLGQSGKLGLLASHIPYDLSPNNTIGDKDTDSTNIVAKGIPVEKGYASSGQKVEIIREWINGANVVQLSPGQSWGMDFTNSTGGQYMVRCRYASTNDTPIFFNLVYDGGSNPIYNQMTFPATKETPAHDSVDNKILGIKGINGNYSLMNVKDSVELPSGKFHVFFTNNGSSAIYLDRLEFVPLDQPAAPTQSTQPINYPITSRLPHRSGEPPAIIWEKSGNVRGNQLTISAQGVPENSQIYLSVGGDRQILDRSNGFKLVNYSPTYSFTNIQASSSNLVDITSGTITGQVQVSNL

SEQ ID NO: 45 - protein, 1186 aa, Bacillus thuringiensis sotto PS80JJ1
MDCNLQSQQNIPYNVLAIPVSNVNALVDTAGDLKKAWEEFQKTGSFSLTALQQGFSASQGGAFNYLTLLQSGISLAGSFVPGGTFVAPIVNMVIGWLWPHKNKTADTENLIKLIDEEIQKQLNKALLDQDRNNWTSFLESIFDTSATVSNAIIDAQWSGTVDTTNRQQKTPTTSDYLNVVGKFDSADSSIITNENQIMNGNFDVAAAPYFVIGATLRLSLYQSYIKFCNSWIDAVGFSTNDANTQKANLARTKLTMRTTINEYTQRVMKVFKDSKNMPTIGTNKFSVDAYNVYVKGMTLNVLDMVAIWSSLYPNDYTSQTAIEQTRVTFSNMVGQEEGTDGTLKIYNTFDSLSYQHSLIPNNNVNLISYYTDELQNLELAVYTPKGGSGYAYPYGFILNYANSNYKYGDNDPTGKPLNKQDGPIQQINAATQNSKYLDGETINGIGASLPGYCTTGCSATEQPFSCTSTANSYKASCNPSDTNQKINALYAFTQTNVKGSTGKLGVLASLVPYDLNPKNVFGELDSDTNNVILKGIPAEKGYFPNNARPTVVKEWINGASAVPFYSGNTLFMTATNLTATQYKIRIRYANPNSDTQIGVLITQNGSQISNSNLTLYSTTDSSMSSNLPQNVYVTGENGNYTLLDLYSTTNVLSTGDITLKLTGGNQKIFIDRIEFIPTMPVPAPTNNTNNNNGDNGNNNPPHHGCAIAGTQQLCSGPPKFEQVSDLEKITTQVYMLFKSSSYEELALKVSSYQINQVALKVMALSDEKFCEEKRLLRKLVNKANQLLEARNLLVGGNFETTQNWVLGTNAYINYDSFLFNGNYLSLQPASGFFTSYAYQKIDESTLKPYTRYKVSGFIGQSNQVELIISRYGKEIDKILNVPYAGPLPITADASITCCAPEIDQCDGGQSDSHFFNYSIDVGALHPELNPGIEIGLKIVQSNGYITISNLEIIEERPLTEMEIQAVNRKDQKWKREKLLECASVSELLQPIINQIDSLFKDANWYNDILPHVTYQTLKNIIVPDLPKLKHWFIDHLPGEYHEIEQKMKEALKHAFTQLDEKNLIHNGHFATNLIDWQVEGDARMKVLENNALALQLSNWDSSVSQSIDILEFDEDKAYKLRVYAQGSGTIQFGNCEDEAIQFNTNSFVYKEKIIYFDTPSINLHIQSEGSEFVVSSIDLVELSDDE

SEQ ID NO: 46 - protein, 340 aa, Bacillus thuringiensis thompsoni
MAIMNDIAQDAARAWDIIAGPFIRPGTTPTNRQLFNYQIGNIEVEPGNLNFSVVPELDFSVSQDLFNNTSVQQSQTASFNESRTETTSTAVTHGVKSGVTVSASAKFNAKILVKSIEQTITTTVSTEYNFSSTTTRTNTVTRGWSIAQPVLVPPHSRVTATLQIYKGDFTVPVLLSLRVYGQTGTLAGNPSFPSLYAATYENTLLGRIREHIAPPALFRASNAYISNGVQAIWRGTATTRVSQGLYSVVRIDERPLAGYSGETRTYYLPVTLSNSSQILTPGSLGSEIPIINPVPNASCKKENSPIIIHHDREKHRERDYDKEHICHDQAEKYERDYDKE

SEQ ID NO: 47 - protein, 613 aa, Clostridium bifermentans malaysia CH18
MNTNIFSTHLEFSKGVASVFKVIDTIHNISKNNNFNNILTQDFIIDTILSILWEDPNENEIFSSMIEDGETITNKNLSAQTKEGLLLNSNSFGLKFKYYNNAFRSWIDNYNPTSIDDVVYRFKDVNSICENNINEFKVKNYEVTVLPIYMQIANLHLLLLRDGMIYGDAWNLYRELGFSDQDSFYNHVLDKTKFYINDCLNYYNTGLSNLKLDPNNSWIDITRYCRFMTFYILDMISICPIYDTKVYDKPINMQTLTRKVYSDPVNFIDENIPISEYEKMYNISPELFSTLFSISFYTNKSGNKFLNGHVNRHVGTDLNYNGLRETHYGNYGSNYEVESMAFDDIKAYSNNYFNNTQNNNPTSVKSIKFLITKNNDEWIYGEPDSSNIDFTRNIQGYLSNLNNESYTHSLSDMILANNDKIQINIDTPHSYSYSWIYKGIEDTNYISDKLINQIPLVKEVKLKSRHYSEISVIKGPGFTGGDLILSKVHKPANQIPAQYMKNKITIPIKTKFPAGSQDFKVRLCYASNHDIGLIRLIAGSKYITTNIQQTFNTTENNPSLIYDDFKYFNFNETLSITSSGIDELYLEFYYSYTDGNFEDFPKLSIPYTRNYSC

SEQ ID NO: 48 - protein, 618 aa, Clostridium bifermentans malaysia CH18
MNNKKIEQNKIVEYNSNLDIQPRELNTLNGLVFTGATVSIILPLIGTTAVVPVVGGVIGIIAALLPVIWPAGTSSNDNLFDAVMKDTEMIMDEKISEYVVNDAMTRLESLYNILDYYRLSKDFWEKNKDDPLAIAELKERFSKLHSQFIESMAYFKRANYEVLLLPAYANAANLHLLLLREGLLLNKVIDNFITEGLHYEEFKTKRSTYIAHCSTWYNKGLENIKNKTRDFNKINKYDAYMNLSVLDIISLFLSYDPYQYDKATKLQTLTRTVFSDPLQRAPRDLYISPKEETLFKNLKGLRAFFAEGDLVLTGFRNYFRNTYINDQIIEGDLFGYTTNNERYKLFTDSKIYKVTVFIDNVALAIVKLIFHDTDNKEWDFSKTDITDINKYRKEEVYLNLLSNNEIQKEPSHYLYKMHHYGDNYNDSYLFQWIHQSISPENYLFDKDKDDNYIITQIPAIKASELSNLGELSLQAIKGPRFTGGNVILSSVSKIDNNDPLYGGTIKIPLLTAFNNTSKFKIRIYYAANHNYNHDYIGALLTINSQHVANFKFKQTFSGEDYSNLSYNNYQFDYLVQTVAFPQNTSDVTLNLQFFYDPKFLNDYKQIVIIDKIEFIPEN

SEQ ID NO: 49 - protein, 706 aa, Paenibacillus popilliae
MNNNFNGGNNTGNNFTGNTLSNGICTKKNMKGTLSRTAIFSDGISDDLICCLDPIYNNNDNNNDAICDELGLTPIDNNTICSTDFTPINVMRTDPFRKKSTQELTREWTEWKENSPSLFTPAIVGVVTSFLLQSLKKQATSFLLKTLTDLLFPNNSSLTMEEILRATEQYVQERLDTDTANRVSQELVGLKNNLTTFNDQVEDFLQNRVGISPLAIIDSINTMQQLFVNRLPQFQVSGYQVLLLPLFAQAATLHLTFLRDVIINADEWNIPTAQLNTYTRYFKEYIAEYSNYALSTYDDGFRTRFYPRNTLEDMLQFKTFMTLNALDLVSIWSLLKYVNLYVSTSANLYNIGDNKVNEGAYPISYGPFFNSYIQTKSNYVLSGVSGIGARFTYSTVLGRYLHDDLKNIITTYVGGTQGPNIGVQLSTTELDELKKQQQATRDSLVDFQFFTLNCMLPNPITAPYFATSLYESRYSSIGGYLRKDVFKSEDSTCGLGNPGAWTSYPDYYITNISATVQINGENTDTTPLYFKENRPITSTRGVNKVIAVYNRKANIAGTNQNGTMIHQAPPDGTGFTVSPLHPSANTITSYIKENYGNSGDSLHLKGQGYLHYMLSGNGQDRYRLVLRLSGAANQIKLQSPTTSIYAFDTSTNNEGITDNGSKFKDFAFSTPFVIPEQKEIVLYFEGVGSLDLMNLIFLPADDTPLY

SEQ ID NO: 50 - protein, 675 aa, Paenibacillus popilliae
MNNNGNALSRTALTPTNNKVISGDLVTNGLPPIDNNIICSNGFMPINVTRKNPFRKRTTQEFIREWTEWKENSPSLFTAPIVGVVTSTLLEALKKQVQSRLLLLMTNLLFPNNSTSTMEEILRATEQYVQEQLDTVTWNRVSQELEGLKNNLRTFNDQIDDFLQNRVEISPTAMIDSINTMQQVFVNRLPQFQLSDYQLLLLPLFAQGATLHLTFIRDIIINAGEWNIPEAQLNTCKRYLKQYVAQYSNYALSTYEGAFRARFYPRATLENMLQFKTFMTLNVLDLVSIWSLLKYMNLYISTSANLYNIGDNKVNEGEYSISYWPFFNSYIQTKSNYVLSGVSGYAIRWYYLNTFFGEYIQDNLYNIIASYVGGVNGPKIGVQLSTTELDKQIKQQARAGMPTGLDDLSFNCTLRNPTTVPYFACNFQELTSSGTAGTGGFIRSDVFRSEDNICGLGTGYASAWTSYPDYYITNISATVQVDGINIDITPLCFGEDRAITSTHGVNKVIAVYNRKANIAGTNQNGTMIHQAPNDGTGFTVSPLHLASFTHPSEAHIQENYGNSGDSLRLTGPTTAITYMLSGDGRTIYKLVLRVSGVITRITAKVRGNSIGYLEYINTVDNNQGITDNGSKFQDFEFRPTITIDAQTPIVLEFSATSNFDLMNLIFIPYYDTPIY

SEQ ID NO: 51 - protein, 695 aa, Paenibacillus popilliae
MNNYFIGKVLSGHHINNNGNGNTLSRTALTPTNNNVNRGDLVTNGLTPIDNNFIGSNGFIPRNVTRKDPFRKRTTQEFIREWTEWKEKSASLFTAPIVGVITSTLLEALKKLVAGRVLMSLTNLLFPNNSTSTMEEILRATEQYIQEQLDTVTWNRVSQELEGLKNDLRTFNDQIDDFLQNRVGISPLAIIDSINTMQQLFVNRLPQFQVSDDQVLLLPLFAQAVTLHLTFVRDIIINADEWNIPEAQLNTYKRYLKQYVAQYSNYALSTYEEAFRARFYPRNTVENMLEFKTFMTLNVLDLVSMWSLLKYVNLYVSTSANLYNIGDNKVNEGEYSISYWPFFNTYIQTKSNYVLSGVSGYAMRWSYTNPFFGEYIQDHLYNITASYIGGVNGPQIGQQLSTTELDQLVQQQARADIPVDFTQIPINCTLRNPLEVPYYATRFNELTSLGTAGVGGFVRSDVFISNDSVCGLGTNYSSGQTFYPDYYITNISATVQVNGTNTDISPLYFGENRAITSTNGVNKVIAIYNRKTNYDDFTNIRGTIVHEAPTDSTGFTISPLHLDTVNINSYLYIQENYGNNGDSLRVINRAIIKYRLSAARSVIYRLVLRVSGTASSIVAIYENYPVGSANQINTGTDNEGVIDNDSKFIDLIFNTPFSVSGTARELQLQVSGATTSSPLDIMNIILIPINDVPLY

SEQ ID NO: 52 - protein, 648 aa, Bacillus thuringiensis jegathesan 367
MHYYGNRNEYDILNASSNDSNMSNTYPRYPLANPQQDLMQNTNYKDWLNVCEGYHIENPREASVRAGLGKGLGIVSTIVGFFGGSIILDTIGLFYQISELLWPEDDTQQYTWQDIMNHVEDLIDKRITEVIRGNAIRTLADLQGKVDDYNNWLKKWKDDPKSTGNLSTLVTKFTALDSDFNGAIRTVNNQGSPGYELLLLPVYAQIANLHLLLLRDAQIYGDKWWSARANARDNYYQIQLEKTKEYTEYCINWYNKGLNDFRTAGQWVNFNRYRREMTLTVLDIISMFPIYDARLYPTEVKTELTREIYSDVINGEIYGLMTPYFSFEKAESLYTRAPHLFTWLKGFRFVTNSISYWTFLSGGQNKYSYTNNSSINEGSFRGQDTDYGGTSSTINIPSNSYVYNLWTENYEYIYPWGDPVNITKMNFSVTDNNSSKELIYGAHRTNKPVVRTDFDFLTNKEGTELAKYNDYNHILSYMLINGETFGQKRHGYSFAFTHSSVDPNNTIAANKITQIPVVKASSINGSISIEKGPGFTGGDLVKMRADSGLTMRFKAELLDKKYRVRIRYKCNYSSKLILRKWKGEGYIQQQIHNISPTYGAFSYLESFTITTTENIFDLTMEVTYPYGRQFVEDIPSLILDKIEFLPTN

SEQ ID NO: 53 - protein, 682 aa, Bacillus thuringiensis higo
MNSYQNKNEYEILDAKRNTCHMSNCYPKYPLANDPQMYLRNTHYKDWINMCEEASYASSGPSQLFKVGGSIVAKILGMIPEVGPLLSWMVSLFWPTIEEKNTVWEDMIKYVANLLKQELTNDTLNRATSNLSGLNESLNIYNRALAAWKQNKNNFASGELIRSYINDLHILFTRDIQSDFSLGGYETVLLPSYASAANLHLLLLRDVAIYGKELGYPSTDVEFYYNEQKYYTEKYSNYCVNTYKSGLESKKQIGWSDFNRYRREMTLSVLDIVALFPLYDTGLYPSKDGKIHVKAELTREIYSDVINDHVYGLMVPYISFEHAESLYTRRPHAFTWLKGFRFVTNSINSWTFLSGGENRYFLTHGEGTIYNGPFLGQDTEYGGTSSYIDISNNSSIYNLWTKNYEWIYPWTDPVNITKINFSITDNSNSSESIYGAERMNKPTVRTDFNFLLNRAGNGPTTYNDYNHILSYMLINGETFGQKRHGYSFAFTHSSVDRYNTIVPDKIVQIPAVKTNLVGANIIKGPGHTGGDLLKLEYERFLSLRIKLIASMTFRIRIRYASNISGQMMINIGYQNPTYFNIIPTTSRDYTELKFEDFQLVDTSYIYSGGPSISSNTLWLDNFSNGPVIIDKIEFIPLGITLNQAQGYDTYDQNANGMYHQNYSNSGYNYNQEYNTYYQSYNN

SEQ ID NO: 54 - protein, 1176 aa, Bacillus thuringiensis kurstaki HD1
MDNNPNINECIPYNCLSNPEVEVLGGERIETGYTPIDISLSLTQFLLSEFVPGAGFVLGLVDIIWGIFGPSQWDAFPVQIEQLINQRIEEFARNQAISRLEGLSNLYQIYAESFREWEADPTNPALREEMRIQFNDMNSALTTAIPLLAVQNYQVPLLSVYVQAANLHLSVLRDVSVFGQRWGFDAATINSRYNDLTRLIGNYTDYAVRWYNTGLERVWGPDSRDWVRYNQFRRELTLTVLDIVALFSNYDSRRYPIRTVSQLTREIYTNPVLENFDGSFRGMAQRIEQNIRQPHLMDILNSITIYTDVHRGFNYWSGHQITASPVGFSGPEFAFPLFGNAGNAAPPVLVSLTGLGIFRTLSSPLYRRIILGSGPNNQELFVLDGTEFSFASLTTNLPSTIYRQRGTVDSLDVIPPQDNSVPPRAGFSHRLSHVTMLSQAAGAVYTLRAPTFSWQHRSAEFNNIIPSSQITQIPLTKSTNLGSGTSVVKGPGFTGGDILRRTSPGQISTLRVNITAPLSQRYRVRIRYASTTNLQFHTSIDGRPINQGNFSATMSSGSNLQSGSFRTVGFTTPFNFSNGSSVFTLSAHVFNSGNEVYIDRIEFVPAEVTFEAEYDLERAQKAVNELFTSSNQIGLKTDVTDYHIDQVSNLVECLSDEFCLDEKQELSEKVKHAKRLSDERNLLQDPNFRGINRQLDRGWRGSTDITIQGGDDVFKENYVTLLGTFDECYPTYLYQKIDESKLKAYTRYQLRGYIEDSQDLEIYLIRYNAKHETVNVPGTGSLWPLSAQSPIGKCGEPNRCAPHLEWNPDLDCSCRDGEKCAHHSHHFSLDIDVGCTDLNEDLGVWVIFKIKTQDGHARLGNLEFLEEKPLVGEALARVKRAEKKWRDKREKLEWETNIVYKEAKESVDALFVNSQYDQLQADTNIAMIHAADKRVHSIREAYLPELSVIPGVNAAIFEELEGRIFTAFSLYDARNVIKNGDFNNGLSCWNVKGHVDVEEQNNQRSVLVLPEWEAEVSQEVRVCPGRGYILRVTAYKEGYGEGCVTIHEIENNTDELKFSNCVEEEIYPNNTVTCNDYTVNQEEYGGAYTSRNRGYNEAPSVPADYASVYEEKSYTDGRRENPCEFNRGYRDYTPLPVGYVTKELEYFPETDKVWIEIGETEGTFIVDSVELLLMEE

SEQ ID NO: 55 - protein, 1176 aa, Bacillus thuringiensis kurstaki HD-1-02
MDNNPNINECIPYNCLSNPEVEVLGGGRIETGYTPIDISLSLTQFLLSEFVPGAGFVLGLVDIIWGIFGPSQWDTFLVQIEQLINQRIEEFARNQAISRLEGLSNLYQIYAESFREWEADPTNPALREEMRIQFNDMNSALTTAIPLLAVQNYQVPLLSVYVQAANLHLSVLRDVSVFGQRWGFDAATINSRYNDLTRLIGNYTDYAVRWYNTGLERVWGPDSRDWVRYNQFRRELTLTVLDIVALFSNYDSRRYPIRTVSQLTREIYTNPVLENFDGSFRGMAQRIEQNIRQPHLMDILNSITIYTDVHRGFNYWSGHQITASPVGFSGPEFAFPLFGNAGNAAPPVLVSLTGLGIFRTLSSPLYRRIILGSGPNNQELFVLDGTEFSFASLTTNLPSTIYRQRGTVDSLDVIPPQDNSVPPRAGFSHRLGHVTMLSQAAGAVYTLRAPTFSWQHRSAEFNNIIPSSQITQIPLTKSTNLGSGTSVVKGPGFTGGDILRRTSPGQISTLRVNITAPLSQRYRVRIRYASTTNLQFHTSIDGRPINQGNFSATMSSGSNLQSGSFRTVGFTTPFNFSNGSSVFTLSAHVFNSGNEVYIDRIEFVPAEVTFEAEYDLERAQKAVNELFTSSNQIGLKTDVTDYHIDQVSNLVECLSDEFCLDEKQELSEKVKHAKRLSDERNLLQDPNFRGINRQLDRGWRGSTDITIQGGDDVFKENYVTLLGTFDECYPTYLYQKIDESKLKAYTRYQLRGYIEDSQDLEIYLIRYNAKHETVNVPGTGSLWPLSAQSPIGKCGEPNRCAPHLEWNPDLDCSCRDGEKCAHHSHHFSLDIDVGCTDLNEDLGVWVIFKIKTQDGHARLGNLEFLEEKPLVGEALARVKIAEKKWRDKREKLEWETNIVYKEAKESVDALFVNSQYDQLQADTNIAMIHAADKRVHSIREAYLPELSVIPGVNAAIFEELEGRIFTAFSLYDARNVIKNGDFNNGLSCWNVKGHVDVEEQNNQRSVLVVPEWEAEVSQEVRVCPGRGYILRVTAYKEGYGEGCVTIHEIENNTDELKFSNCVEEEIYSNNTVTCNDYTVNQEEYGGAYTSRNRGYNEAPSVPADYASVYEEKSYTDGRRENPCEFNRGYRDYTPLPVGYVTKELEYFPETDKVWIEIGETEGTFIVDSVELLLMEE

SEQ ID NO: 56 - protein, 1176 aa, Bacillus thuringiensis kurstaki
MDNNPNINECIPYNCLSNPEVEVLGGERIETGYTPIDISLSLTQFLLSEFVPGAGFVLGLVDIIWGIFGPSQWDAFLVQIEQLINQRIEEFARNQAISRLEGLSNLYQIYAESFREWEADPTNPALREEMRIQFNDMNSALTTAIPLLAVQNYQVPLLSVYVQAANLHLSVLRDVSVFGQRWGFDAATINSRYNDLTRLIGNYTDYAVRWYNTGLERVWGPDSRDWVRYNQFRRELTLTVLDIVALFSNYDSRRYPIRTVSQLTREIYTNPVLENFDGSFRGMAQRIEQNIRQPHLMDILNSITIYTDVHRGFNYWSGHQITASPVGFSGPEFAFPLFGNAGNAAPPVLVSLTGLGIFRTLSSPLYRRIILGSGPNNQELFVLDGTEFSFASLTTNLPSTIYRQRGTVDSLDVIPPQDNSVPPRAGFSHRLSHVTMLSQAAGAVYTLRAPTFSWQHRSAEFNNIIPSSQITQIPLTKSTNLGSGTSVVKGPGFTGGDILRRTSPGQISTLRVNITAPLSQRYRVRIRYASTTNLQFHTSIDGRPINQGNFSATMSSGSNLQSGSFRTVGFTTPFNFSNGSSVFTLSAHVFNSGNEVYIDRIEFVPAEVTFEAEYDLERAQKAVNELFTSSNQIGLKTDVTDYHIDQVSNLVECLSDEFCLDEKQELSEKVKHAKRLSDERNLLQDPNFRGINRQLDRGWRGSTDITIQGGDDVFKENYVTLLGTFDECYPTYLYQKIDESKLKAYTRYQLRGYIEDSQDLEIYLIRYNAKHETVNVPGTGSLWPLSAQSPIGKCGEPNRCAPHLEWNPDLDCSCRDGEKCAHHSHHFSLDIDVGCTDLNEDLGVWVIFKIKTQDGHARLGNLEFLEEKPLVGEALARVKRAEKKWRDKREKLEWETNIVYKEAKESVDALFVNSQYDQLQADTNIAMIHAADKRVHSIREAYLPELSVIPGVNAAIFEELEGRIFTAFSLYDARNVIKNGDFNNGLSCWNVKGHVDVEEQNNQRSVLVVPEWEAEVSQEVRVCPGRGYILRVTAYKEGYGEGCVTIHEIENNTDELKFSNCVEEEIYPNNTVTCNDYTVNQEEYGGAYTSRNRGYNEAPSVPADYASVYEEKSYTDGRRENPCEFNRGYRDYTPLPVGYVTKELEYFPETDKVWIEIGETEGTFIVDSVELLLMEE

SEQ ID NO: 57 - protein, 1176 aa, Bacillus thuringiensis Ly30
MDNNPNINECIPYNCLSNPEVEVLGGERIETGYTPIDISLSLTQFLLSEFVPGAGFVLGLVDIIWGIFGPSQWDAFLVQIEQLINQRIEEFARNQAISRLEGLSNLYQIYAESFREWEADPTNPALREEMRIQFNDMNSALTTAIPLFAVQNYQVPLLSVYVQAANLHLSVLRDVSVFGQRWGFDAATINSRYNDLTRLIGNYTDYAVRWYNTGLERVWGPDSRDWVRYNQFRRELTLTVLDIVALFSNYDSRRYPIRTVSQLTREIYTNPVLENFDGSFRGMAQRIEQNIRQPHLMDILNSITIYTDVHRGFNYWSGHQITASPVGFSGPEFAFPLFGNAGNAAPPVLVSLTGLGIFRTLSSPLYRRIILGSGPNNQELFVLDGTEFSFASLTTNLPSTIYRQRGTVDSLDVIPPQDNSVPPRAGFSHRLSHVTMLSQAAGAVYTLRAPTFSWQHRSAEFNNIIPSSQITQIPLTKSTNLGSGTSVVKGPGFTGGDILRRTSPGQISTLRVNITAPLSQRYRVRIRYASTTNLQFHTSIDGRPINQGNFSATMSSGSNLQSGSFRTVGFTTPFNFSNGSSVFTLSAHVFNSGNEVYIDRIEFVPAEVTFEAEYDLERAQKAVNELFTSSNQIGLKTDVTDYHIDQVSNLVECLSDEFCLDEKQELSEKVKHAKRLSDERNLLQDPNFRGINRQLDRGWRGSTDITIQGGDDVFKENYVTLLGTFDECYPTYLYQKIDESKLKAYTRYQLRGYIEDSQDLEIYLIRYNAKHETVNVPGTGSLWPLSAQSPIGKCGEPNRCAPHLEWNPDLDCSCRDGEKCAHHSHHFSLDIDVGCTDLNEDLGVWVIFKIKTQDGHARLGNLEFLEEKPLVGEALARVKRAEKKWRDKREKLEWETNIVYKEAKESVDALFVNSQYDQLQADTNIAMIHAADKRVHSIREAYLPELSVIPGVNAAIFEELEGRIFTAFSLYDARNVIKNGDFNNGLSCWNVKGHVDVEEQNNQRSVLVVPEWEAEVSQEVRVCPGRGYILRVTAYKEGYGEGCVTIHEIENNTDELKFSNCVEEEIYPNNTVTCNDYTVNQEEYGGAYTSRNRGYNEAPSVPADYASVYEEKSYTDGRRENPCEFNRGYRDYTPLPVGYVTKELEYFPETDKVWIEIGETEGTFIVDSVELLLMEE

SEQ ID NO: 58 - protein, 1180 aa, Bacillus thuringiensis sotto
MDNNPNINECIPYNCLSNPEVEVLGGERIETGYTPIDISLSLTQFLLSEFVPGAGFVLGLVDIIWGIFGPSQWDAFLVQIEQLINQRIEEFARNQAISRLEGLSNLYQIYAESFREWEADPTNPALREEMRIQFNDMNSALTTAIPLFAVQNYQVPLLSVYVQAANLHLSVLRDVSVFGQRWGFDAATINSRYNDLTRLIGNYTDYAVRWYNTGLERVWGPDSRDWVRYNQFRRELTLTVLDIVALFSNYDSRRYPIRTVSQLTREIYTNPVLENFDGSFRGMAQRIEQNIRQPHLMDILNRITIYTDVHRGFNYWSGHQITASPVGFSGPEFAFPLFGNAGNAAPPVLVSLTGLGIFRTLSSPLYRRIILGSGPNNQELFVLDGTEFSFASLTTNLPSTIYRQRGTVDSLDVIPPQDNSVPPRAGFSHRLSHVTMLSQAAGAVYTLRAPTFSWQHRSAEFNNIIPSSQITQIPLTKSTNLGSGTSVVKGPGFTGGDILRRTSPGQISTLRVNITAPLSQRYRVRIRYASTTNLQFHTSIDGRPINQGNFSATMSSGSNLQSGSFRTVGFTTPFNFSNGSSVFTLSAHVFNSGNEVYIDRIEFVPAEVTFEAEYDLERAQKAVNELFTSSNQIGLKTDVTDYHIDQVSNLVECLSDEFCLDEKQELSEKVKHAKRLSDERNLLQDPNFRGINRQLDRGWRGSTDITIQGGDDVFKENYVTLLGTFDECYPTYLYQKIDESKLKAYTRYQLRGYIEDSQDLEIYLIRYNAKHETVNVPGTGSLWPLSAQSPIGKCGEPNRCAPHLEWNPDLDCSCRDGEKCAHHSHHFSLDIDVGCTDLNEDLGVWVIFKIKTQDGHARLGNLEFLEEKPLVGEALARVKRAEKKWRDKREKLEWETNIVYKEAKESVDALFVNSQYDRLQADTNIAMIHAADKRVHSIREAYLPELSVIPGVNAAIFEELEGRIFTAFSLYDARNVIKNGDFNNGLSCWNVKGHVDVEEQNNHRSVLVVPEWEAEVSQEVRVCPGRGYILRVTAYKEGYGEGCVTIHEIENNTDELKFSNCVEEEVYPNNTVTCNDYTATQEEYEGTYTSRNRGYDGAYESNSSVPADYASAYEEKAYTDGRRDNPCESNRGYGDYTPLPAGYVTKELEYFPETDKVWIEIGETEGTFIVDSVELLLMEE

SEQ ID NO: 59 - protein, 1183 aa, Bacillus thuringiensis
MDNNPNINECIPYNCLSNPEVEVLGGERIETGYTPIDISLSLTQFLLSEFVPGAGFVLGLVDIIWGIFGPSQWDAFLVQIEQLINQRIEEFARNQAISRLEGLSNLYQIYAESFREWEADPTNPALREEMRIQFNDMNSALTTAIPLLAVQNYQVPLLSVYVQAANLHLSVLRDVSVFGQRWGFDAATINSRYNDLTRLIGNYTDYAVRWYNTGLERVWGPDSRDWVRYNQFRRELTLTVLDIVALFSNYDSRRYPIRTVSQLTREIYTNPVLENFDGSFRGMAQRIEQNIRQPHLMDILNSITIYTDVHRGFNYWSGHQITASPVGFSGPEFAFPLFGNAGNAAPPVLVSLTGLGIFRTLSSPLYRRIILGSGPNNQELFVLDGTEFSFASLTTNLPSTIYRQRGTVDSLDVIPPQDNSVPPRAGFSHRLSHVTMLSQAAGAVYTLRAPTFSWQHRSAEFNNIIPSSQVTQIPLTKSTNLGSGTSVVKGPGFTGGDILRRTSPGQISTLRVNITAPLSQRYRVRIRYASTTNLQFHTSIDGRPINQGNFSATMCSGSNLQSGSFRTVGFTTPFNFPNGSSVFTLSAHVFNSGNEVYIDRIEFVPAEVTFEAEYDLERAQKAVNELFTSSNQIGLKTDVTDYHIDQVSNLVECLSDEFCLDEKQELSEKVKHAKRLSDERNLLQDPNFRGINRQLDRGWRGSTDITIQGGDDVFKENYVTLLGTFDECYPTYLYQKIDESKLKAYTRYQLRGYIEDSQDLEIYLIRYNAKHETVNVPGTGSLWPLSAQSPIGKCGEPNRCAPHLEWNPDLDCSCRDEGKCAHHSHHFSLDIDVGCTDLNEDLGVWVIFKIKTQDGHARLGNLEFLEEKPLVGEALARVKRAEKKWRDKREKLEWETNIVYKEAKESVDALFVNSQYDRLQADTNIAMIHAADKRVHSIREAYLPELSVIPGVNAAIFEELEGRIFTAFSLYDARNVIKNGDFNNGLSCWNVKGHVDVEEQNNHRSVLVVPEWEAEVSQEVRVCPGRGYILRVTAYKEGYGEGCVTIHEIENNTDELKFSNCVEEEVYPNNTVTCNDYTATQEEYEGTYTSRNRGYDGAYESNSSVPADYASAYEEKAYTDGRRDNPCESNRGYGDYTPLPAGYVTKELEYFPETDKVWIEIGETEGTFIVDSVELLLMEEVDA

SEQ ID NO: 60 - protein, 1163 aa, Bacillus thuringiensis INTA Mol-12
NECIPYNCLSNPEVEVLGGERIETGYTPIDISLSLTQFLLSEFVPGAGFVLGLVDIIWGIFGPSQWDAFLVQIEQLINQRIEEFARNQAISRLEGLSNLYQIYAESFREWEADPTNPALREEMRIQFNDMNSALTTAIPLLAVQNYQVPLLSVYVQAANLHLSVLRDVSVFGQRWGFDAATINSRYNDLTRLIGNYTDYAVRWYNTGLERVWGPDSRDWVRYNQFRRELTLTVLDIVALFSNYDSRRYPIRTVSQLTREIYTNPVLENFDGSFRGMAQRIGQNIRQPHLMDILNSITIYTDVHRGFNYWSGHQITASPVGFSGPEFAFPLFGNAGNAAPPVLVSLTGLGIFRTLSSPLYRRIILGSGPNNQELFVLDGTEFSFASLTTNLPSTIYRQRGTVDSLDVIPPQDNSVPPRAGFSHRLSHVTMLSQAAGAVYTLRAPTFSWQHRSAEFNNIIPSSQITQIPLTKSTNLGSGTSVVKGPGFTGGDILRRTSPGQISTLRVNITAPLSQRYRVRIRYASTTNLQFHTSIDGRPINQGNFSATMSSGSNLQSGSFRTVGFTTPFNFSNGSSVFTLSAHVFNSGNEVYIDRIEFVPAEVTFEAEYDLERAQKAVNELFTSSNQIGLKTDVTDYHIDQVSNLVECLSDEFCLDEKQELSEKVKHAKRLSDERNLLQDPNFRGINRQLDRGWRGSTDITIQGGDDVFKENYVTLLGTFDECYPTYLYQKIDESKLKAYTRYQLRGYIEDSQDLEIYLIRYNAKHETVNVPGTGSLWPLSAQSPIGKCGEPNRCAPHLEWNPDLDCSCRDGEKCAHHSHHFSLDIDVGCTDLNEDLGVWVIFKIKTQDGHARLGNLEFLEEKPLVGEALARVKRAEKKWRDKREKLEWETNIVYKEAKESVDALFVNSQYDQLQADTNIAMIHAADKRVHSIREAYLPELSVIPGVNAAIFEELEGRIFTAFSLYDARNVIKNGDFNNGLSCWNVKGHVDVEEQNNQRSVLVVPEWEAEVSQEVRVCPGRGYILRVTAYKEGYGEGCVTIHEIENNTDELKFSNCVEEEIYPNNTVTCNDYTVNQEEYGGAYTSRNRGYNEAPSVPADYASVYEEKSYTDGRRENPCEFNRGYRDYTPLPVGYVTKELEYFPETDKVWIEIGETEGTFIVDSVE

SEQ ID NO: 61 - protein, 1175 aa, Bacillus thuringiensis LS-R-21
MDNNPNINECIPYNCLSNPEVEVLGGERIETGYTPIDISLSLTQFLLSEFVPGAGFVLGLVDIIWGIFGPSQWDAFLVQIEQLINQRIEEFARNQAISRLEGLSNLYQIYAESFREWEADPTNPALREEMRIQFNDMNSALTTAIPLLAVQNYQVPLLSVYVQAANLHLSVLRDVSVFGQRWGFDAATINSRYNDLTRLIGNYTDYAVRWYNTGLERVWGPDSRDWVRYNQFRRELTLTVLDIVALFSNYDSRRYPIRTVSQLTREIYTNPVLENFDGSFRGMAQRIEQNIRQPHLMDILNSITIYTDVHRGFNYWSGHQITASPVGFSGPEFAFPLFGNAGNAAPPVLVSLTGLGIFRTLSSPLYRRIILGSGPNNQELFVLDGTEFSFASLTTNLPSTIYRQRGTVDSLDVIPPQDNSVPPRAGFSHRLSHVTMLSQAAGAVYTLRAPTFSWQHRSAEFNNIIPSSQITQIPLTKSTNLGSGTSVVKGPGFTGGDILRRTSPGQISTLRVNITAPLSQRYRVRIRYASTTNLQFHTSIDGRPINQGNFSATMSSGSNLQSGSFRTVGFTTPFNFSNGSSVFTLSAHVFNSGNEVYIDRIEFVPAEVTFEAEYDLERAQKAVNELFTSSNQIGLKTDVTDYHIDQVSNLVECLSDEFCLDEKQELSEKVKHAKRLSDERNLLQDPNFRGINRQLDRGWRGSTDITIQGGDDVFKENYVTLLGTFDECYPTYLYQKIDESKLKAYTRYQLRGYIEDSQDLEIYLIRYNAKHETVNVPGTGSLWPLSAQSPIGKCGEPNRCAPHLEWNPDLDCSCRDGEKCAHHSHHFSLDIDVGCTDLNEDLGVWVIFKIKTQDGHARLGNLEFLEEKPLVGEALARVKRAEKKWRDKREKLEWETNIVYKEAKESVDALFVNSQYDQLQADTNIAMIHAADKRVHSIREAYLPELSVIPGVNAAIFEELEGRIFTAFSLYDARNVIKNGDFNNGLSCWNVKGHVDVEEQNNQRSVLVVPEWEAEVSQEVRVCPGRGYILRVTAYKEGYGEGCVTIHEIENNTDELKFSNCVEEEIYPNNTVTCNDYTVNQEEYGGAYTSRNRGYNEAPSVPADYASVYEEKSYTDGRRENPCEFNRGYRDYTPLPVGYVTKELEYFPETDKVWIEIGETEGTFIVDSVELLLME

SEQ ID NO: 62 - protein, 934 aa, Bacillus thuringiensis sotto
MDNNPNINECIPYNCLSNPEVEVLGGERIETGYTPIDISLSLTQFLLSEFVPGAGFVLGLVDIIWGIFGPSQWDAFLVQIEQLINQRIEEFARNQAISRLEGLSNLYQIYAESFREWEADPTNPALREEMRIQFNDMNSALTTAIPLFAVQNYQVPLLSVYVQAANLHLSVLRDVSVFGQRWGFDAATINSRYNDLTRLIGNYTDYAVRWYNTGLERVWGPDSRDWVRYNQFRRELTLTVLDIVALFSNYDSRRYPIRTVSQLTREIYTNPVLENFDGSFRGMAQRIEQNIRQPHLMDILNRITIYTDVHRGFNYWSGHQITASPVGFSGPEFAFPLFGNAGNAAPPVLVSLTGLGIFRTLSSPLYRRIILGSGPNNQELFVLDGTEFSFASLTTNLPSTIYRQRGTVDSLDVIPPQDNSVPPRAGFSHRLSHVTMLSQAAGAVYTLRAPTFSWQHRSAEFNNIIPSSQITQIPLTKSTNLGSGTSVVKGPGFTGGDILRRTSPGQISTLRVNITAPLSQRYRVRIRYASTTNLQFHTSIDGRPINQGNFSATMSSGSNLQSGSFRTVGFTTPFNFSNGSSVFTLSAHVFNSGNEVYIDRIEFVPAEVTFEAEYDLERAQKAVNELFTSSNQIGLKTDVTDYHIDQVSNLVECLSDEFCLDEKQELSEKVKHAKRLSDERNLLQDPNFRGINRQLDRGWRGSTDITIQGGDDVFKENYVTLLGTFDECYPTYLYQKIDESKLKAYTRYQLRGYIEDSQDLEIYLIRYNAKHETVNVPGTGSLWPLSAQSPIGKCGEPNRCAPHLEWNPDLDCSCRDGEKCAHHSHHFSLDIDVGCTDLNEDLGVWVIFKIKTQDGHARLGNLEFLEEKPLVGEALARVKRAEKKWRDKREKLEWETNIVYKEAKESVDALFVNSQYDRLQADTNIAMIHAADKR

SEQ ID NO: 63 - protein, 1176 aa, Bacillus thuringiensis aizawai IPL7; identical to SEQ ID NO: 57

SEQ ID NO: 64 - protein, 1176 aa, Bacillus thuringiensis entomocidus
MDNNPNINECIPYNCLSNPEVEVLGGERIETGYTPIDISLSLTQFLLSEFVPGAGFVLGLVDIIWGIFGPSQWDAFPVQIEQLINQRIEEFARNQAISRLEGLSNLYQIYAESFREWEADPTNPALREEMRIQFNDMNSALTTAIPLLAVQNYQVPLLSVYVQAANLHLSVLRDVSVFGQRWGFDAATINSRYNDLTRLIGNYTDYAVRWYNTGLERVWGPDSRDWVRYNQFRRELTLTVLDIVALFSNYDSRRYPIRTVSQLTREIYTNPVLENFDGSFRGMAQRIEQNIRQPHLMDILNSITIYTDVHRGFNYWSGHQITASPVGFSGPEFAFPLFGNAGNAAPPVLVSLTGLGIFRTLSSPLYRRIILGSGPNNQELFVLDGTEFSFASLTTNLPSTIYRQRGTVDSLDVIPPQDNSVPPRAGFSHRLSHVTMLSQAAGAVYTLRAPTFSWQHRSAEFNNIIPSSQITQIPLTKSTNLGSGTSVVKGPGFTGGDILRRTSPGQISTLRVNITAPLSQRYRVRIRYASTTNLQFHTSIDGRPINQGNFSATMSSGSNLQSGSFRTVGFTTPFNFSNGSSVFTLSAHVFNSGNEVYIDRIEFVPAEVTFEAEYDLERAQKAVNELFTSSNQIGLKTDVTDYHIDQVSNLVECLSDEFCLDEKQELSEKVKHAKRLSDERNLLQDPNFRGINRQLDRGWRGSTDITIQGGDDVFKENYVTLLGTFDECYPTYLYQKIDESKLKAYTRYQLRGYIEDSQDLEIYLIRYNAKHETVNVPGTGSLWPLSAQSPIGKCGEPNRCAPHLEWNPDLDCSCRDGEKCAHHSHHFSLDIDVGCTDLNEDLGVWVIFKIKTQDGHARLGNLEFLEEKPLVGEALARVKRAEKKWRDKREKLEWETNIVYKEAKESVDALFVNSQYDQLQADTNIAMIHAADKRVHSIREAYLPELSVIPGVNAAIFEELEGRIFTAFSLYDARNVIKNGDFNNGLSCWNVKGHVDVEEQNNQRSVLVVPEWEAEVSQEVRVCPGRGYILRVTAYKEGYGEGCVTIHEIENNTDELKFSNCVEEEIYPNNTVTCNDYTVNQEEYGGAYTSRNRGYNEAPSVPADYASVYEEKSYTDGRRENPCEFNRGYRDYTPLPVGYVTKELEYFPETDKVWIEIGETEGTFIVDSVELLLMEE

SEQ ID NO: 65 - protein, 1176 aa, Bacillus thuringiensis Fu-2-7
MDNNPNINECIPYNCLSNPEVEVLGGERIETGYTPIDISLSLTQFLLSEFVPGAGFVLGLVDIIWGIFGPSQWDAFLVQIEQLINQRIEEFARNQAISRLEGLSNLYQIYAESFREWEADPTNPALREEMRIQFNDMNSALTTAIPLLAVQNYQVPLLSVYVQAANLHLSVLRDVSVFGQRWGFDAATINSRYNDLTRLIGNYTDYAVRWYNTGLERVWGPDSRDWVRYNQFRRELTLTVLDIVALFSNYDSRRYPIRTVSQLTREIYTNPVLENFDGSFRGMAQRIEQNIRQPHLMDILNSITIYTDVHRGFNYWSGHQITASPVGFSGPEFAFPLFGNAGNAAPPVLVSLTGLGIFRTLSSPLYRRIILGSGPNNQELFVLDGTEFSFASLTTNLPSTIYRQRGTVDSLDVIPPQDNSVPPRAGFSHRLSHVTMLSQAAGAVYTLRAPTFSWQHRSAEFNNIIPSSQITQIPLTKSTNLGSGTSVVKGPGFTGGDILRRTSPGQISTLRVNITAPLSQRYRVRIRYASTTNLQFHTSIDGRPINQGNFSATMSSGSNLQSGSFRTVGFTTPFNFSNGSSVFTLSAHVFNSGNEVYIDRIEFVPAEVTFEAEYDLERAQKAVNELFTSSNQIGLKTDVTDYHIDQVSNLVECLSDEFCLDEKQELSEKVKHAKRLSDERNLLQDPNFRGINRQLDRGWRGSTDITIQGGDDVFKENYVTLLGTFDECYPTYLYQKIDESKLKAYTRYQLRGYIEDSQDLEIYLIRYNAKHETVNVPGTGSLWPLSAQSPIGKCGEPNRCAPHLEWNPDLDCSCRDGEKCAHHSHHFSLDIDVGCTDLNEDLGVWVIFKIKTQDGHARLGNLEFLEEKPLVGEALARVKRAEKKWRDKREKLEWETNIVYKEAKESVDALFVNSQYDQLQADTNIAMIHAADKRVHSIREAYLPELSVIPGVNAAIFEELEGRISTAFSLYDARNVIKNGDFNNGLSCWNVKGHVDVEEQNNQRSVLVVPEWEAEVSQEVRVCPGRGYILRVTAYKEGYGEGCVTIHEIENNTDELKFSNCVEEEIYPNNTVTCNDYTVNQEEYGGAYTSRNRGYNEAPSVPADYASVYEEKSYTDGRRENPCEFNRGYRDYTPLPVGYVTKELEYFPETDKVWIEIGETEGTFIVDSVELLLMEE

SEQ ID NO: 66 - protein, 620 aa, Bacillus thuringiensis kurstaki NRD-12
MDNNPNINECIPYNCLSNPEVEVLGGERIETGYTPIDISLSLTQFLLSEFVPGAGFVLGLVDIIWGIFGPSQWDAFLVQIEQLINQRIEEFARNQAISRLEGLSNLYQIYAESFREWEADPTNPALREEMRIQFNDMNSALTTAIPLLAVQNYQVPLLSVYVQAANLHLSVLRDVSVFGQRWGFDAATINSRYNDLTRLIGNYTDYAVRWYNTGLERVWGPDSRDWVRYNQFRRELTLTVLDIVALFSNYDSRRYPIRTVSQLTREIYTNPVLENFDGSFRGMAQRIEQNIRQPHLMDILNSITIYTDVHRGFNYWSGHQITASPVGFSGPEFAFPLFGNAGNAAPPVLVSLTGLGIFRTLSSPLYRRIILGSGPNNQELFVLDGTEFSFASLTTNLPSTIYRQRGTVDSLDVIPPQDNSVPPRAGFSHRLSHVTMLSQAAGAVYTLRAPTFSWQHRSAEFNNIIPSSQITQIPLTKSTNLGSGTSVVKGPGFTGGDILRRTSPGQISTLRVNITAPLSQRYRVRIRYASTTNLQFHTSIDGRPINQGNFSATMSSGSNLQSGSFRTVGFTTPFNFSNGSSVFTLSAHVFNSGNEVYIDRIEFVPAEVTFEAEYDLERAQ

SEQ ID NO: 67 - protein, 1176 aa, Bacillus thuringiensis C12
MDNNPNINECIPYNCLSNPEVEVLGGERIETGYTPIDISLSLTQFLLSEFVPGAGFVLGLVDIIWGIFGPSQWDAFLVQIEQLINQRIEEFARNQAISRLEGLSNLYQIYAESFREWEADPTNPALREEMRIQFNDMNSALTTAIPLLAVQNYQVPLLSVYVQAANLHLSVLRDVSVFGQRWGFDAATINSRYNDLTRLIGNYTDYAVRWYNTGLERVWGPDSRDWVRYNQFRRELTLTVLDIVALFSNYDSRRYPIRTVSQLTREIYTNPVLENFDGSFRGMAQRIEPEYRQPHLMDILNSITIYTDVHRGFNYWSGHQITTSPVGFSGPEFAFPLFGNAGNAAPPVLVSLTGLGIFRTLSSPLYRRIILGSGPNNQELFVLDGTEFSFASLTTNLPSTIYRQRGTVDSLDVIPPQDNSVPPRAGFSHRLSHVPMLSQAAGAVYTLRASLFLRLDPSAEFNNIIPSFTNYQIPLTKSTNLGSGTSVVKGPGFTGGDILRRTSPGLISTLRVNITAPLSQRYRVRIRYASTTNLQFHTSIDGRPINQGNFYATMSSGSNLQSGSFRTVGFTTPFNFSNGSSVFTLSAHVFNSGNEVYIDRIEFVPAEVTFEAEYDLERAQNGVNQLFTSSNQIGLKTDGTDYHIDQVSNLVECLSDEFCLDEKQELSEKVKHAKRLSDERNLLQDPNFRGINRQLDRGWRGSHDITIQGGDDVFKENYVTLLGTFDECYPTYLYQKIDQSKLKAYTSYQLRGYIEDSQDLEIYLIRYNAKQQTVNVPGTGSLWPVSAPKPIGKCGEPNRCAPHLEWNPDLDCSCRDGEKCAHHSHHFSLDIDVGCTDLNEDLGVWVIFKIKTEDGHARLGNLEFLEEKPLVGEALARVKRAEKKWRDKREKLEWETNIVYKEAKESVDALFVNSQYDQLQADTNIAMIHAADKRVHSIREAYLPELSVIPGVNAAIFEELEGRIFTAFSLYDARNVIKNGDFNNGLSCWNVKGHVDVEEQNNQRSVLVVPEWEAEVSQEVRVCPGRGYILRVTAYKEGYGEGCVTIHEIENNTDELKFSNCVEEEIYPNNTVTCNDYTVNQEEYGGAYTSRNRGYNEAPSVPADYASVYEEKSYTDGRRENPCEFNRGYRDYTGLPVGYVTKALEYFPETDKVWIEIGETEGTFIVDSVELLLMEE

SEQ ID NO: 68 - protein, 1180 aa, Bacillus thuringiensis dendrolimus T84A1; identical to SEQ ID NO: 58

SEQ ID NO: 69 - protein, 1155 aa, Bacillus thuringiensis berliner 1715
MDNNPNINECIPYNCLSNPEVEVLGGERIETGYTPIDISLSLTQFLLSEFVPGAGFVLGLVDIIWGIFGPSQWDAFLVQIEQLINQRIEEFARNQAISRLEGLSNLYQIYAESFREWEADPTNPALREEMRIQFNDMNSALTTAIPLFAVQNYQVPLLSVYVQAANLHLSVLRDVSVFGQRWGFDAATINSRYNDLTRLIGNYTDHAVRWYNTGLERVWGPDSRDWIRYNQFRRELTLTVLDIVSLFPNYDSRTYPIRTVSQLTREIYTNPVLENFDGSFRGSAQGIEGSIRSPHLMDILNSITIYTDAHRGEYYWSGHQIMASPVGFSGPEFTFPLYGTMGNAAPQQRIVAQLGQGVYRTLSSTLYRRPFNIGINNQQLSVLDGTEFAYGTSSNLPSAVYRKSGTVDSLDEIPPQNNNVPPRQGFSHRLSHVSMFRSGFSNSSVSIIRAPMFSWIHRSAEFNNIIPSSQITQIPLTKSTNLGSGTSVVKGPGFTGGDILRRTSPGQISTLRVNITAPLSQRYRVRIRYASTTNLQFHTSIDGRPINQGNFSATMSSGSNLQSGSFRTVGFTTPFNFSNGSSVFTLSAHVFNSGNEVYIDRIEFVPAEVTFEAEYDLERAQKAVNELFTSSNQIGLKTDVTDYHIDQVSNLVECLSDEFCLDEKKELSEKVKHAKRLSDERNLLQDPNFRGINRQLDRGWRGSTDITIQGGDDVFKENYVTLLGTFDECYPTYLYQKIDESKLKAYTRYQLRGYIEDSQDLEIYLIRYNAKHETVNVPGTGSLWPLSAPSPIGKCAHHSHHFSLDIDVGCTDLNEDLGVWVIFKIKTQDGHARLGNLEFLEEKPLVGEALARVKRAEKKWRDKREKLEWETNIVYKEAKESVDALFVNSQYDRLQADTNIAMIHAADKRVHSIREAYLPELSVIPGVNAAIFEELEGRIFTAFSLYDARNVIKNGDFNNGLSCWNVKGHVDVEEQNNHRSVLVVPEWEAEVSQEVRVCPGRGYILRVTAYKEGYGEGCVTIHEIENNTDELKFSNCVEEEVYPNNTVTCNDYTATQEEYEGTYTSRNRGYDGAYESNSSVPADYASAYEEKAYTDGRRDNPCESNRGYGDYTPLPAGYVTKELEYFPETDKVWIEIGETEGTFIVDSVELLLMEE

SEQ ID NO: 70 - protein, 1155 aa, Bacillus thuringiensis kurstaki S93; identical to SEQ ID NO: 69

SEQ ID NO: 71 - protein, 1155 aa, Bacillus thuringiensis c005; identical to SEQ ID NO: 69

SEQ ID NO: 72 - protein, 1155 aa, Bacillus thuringiensis
MDNNPNINECIPYNCLSNPEVEVLGGERIETGYTPIDISLSLTQFLLSEFVPGAGFVLGLVDIIWGIFGPSQWDAFLVQIEQLINQRIEEFARNQAISRLEGLSNLYQIYAESFREWEADPTNPALREEMRIQFNDMNSALTTAIPLFAVQNYQVPLLSVYVQAANLHLSVLRDVSVFGQRWGFDAATINSRYNDLTRLIGNYTDHAVRWYNTGLERVWGPDSRDWIRYNQFRRELTLTVLDIVSLFPNYDSRTYPIRTVSQLTREIYTNPVLENFDGSFRGSAQGIEGSIRSPHLMDILNSITIYTDAHRGEYYWSGHQIMASPVGFSGPEFTFPLYGTMGNAAPQQRIVAQLGQGVYRTLSSTLYRRPFNIGINNQQLSVLDGTEFAYGTSSNLPSAVYRKSGTVDSLDEIPPQNNNVPPRQGFSHRLSHVSMFRSGFSNSSVSIIRAPMFSWIHRSAEFNNIIPSSQITQIPLTKSTNLGSGTSVVKGPGFTGGDILRRTSPGQISTLRVNITAPLSQRYRVRIRYASTTNLQFHTSIDGRPINQGNFSATMSSGSNLQSGSFRTVGFTTPFNFSNGSSVFTLSAHVFNSGNEVYIDRIEFVPAEVTFEAEYDLERAQKAVNELFTSSNQIGLKTDVTDYHIDQVSNLVECLSDEFCLDEKKELSEKVKHAKRLSDERNLLQDPNLRGINRQLDRGWRGSTDITIQGGDDVFKENYVTLLGTFDECYPTYLYQKIDESKLKAYTRYQLRGYIEDSQDLEIYLIRYNAKHETVNVPGTGSLWPLSAPSPIGKCAHHSHHFSLDIDVGCTDLNEELGVWVIFKIKTQDGHARLGNLEFLEEKPLVGEALARVKRAEKKWRDKREKLEWETNIVYKEAKESVDALFINSQYDRLQADTNIAMIHAADKRVHSIREAYLPELSVIPGVNAAIFEELEGRISTAFSLYDARNVIKNGDFNNGLSCWNVKGHVDVEEQNNHRSVLVVPEWEAEVSQEVRVCPGRGYILRVTAYKEGYGEGCVTIHEIENNTDELKFSNCVEEEVYPNNTVTCNDYTATQEEYEGTYTSRNRGYDGAYESNSSVPADYASAYEEKAYTDGRRDNPCESNRGYGDYTPLPAGYVTKELEYFPETDKVWIEIGETEGTFIVDSVELLLMEE

SEQ ID NO: 73 - protein, 1155 aa, Bacillus thuringiensis B-Hm-16; identical to SEQ ID NO: 69

SEQ ID NO: 74 - protein, 1155 aa, Bacillus thuringiensis AC-11
MDNNPNINECIPYNCLSNPEVEVLGGERIETGYTPIDISLSLTQFLLSEFVPGAGFVLGLVDIIWGIFGPSQWDAFLVQIEQLINQRIEEFARNQAISRLEGLSNLYQIYAESFREWEADPTNPALREEMRIQFNDMNSALTTAIPLFAVQNYRVPLLSVYVQAVNLHLSVLRDVLVFGQRWGFDAATINSRYNDLTRLIGNYTDHAVRWYNTGLERVWGPDSRDWIRYNQFRRELTLTVLDIVSLFPNYDSRTYPIRTVSQLTREIYTNPVLENFDGSFRGSAQGIEGSIRSPHLMDILNSITIYTDAHRGEYYWSGHQIMASPVGFSGPEFTFPLYGTMGNAAPQQRIVAQLGQGVYRTLSSTLYRRPFNIGINNQQLSVLDGTEFAYGTSSNLPSAVYRKSGTVDSLDEIPPQNNNVPPRQGFSHRLSHVSMFRSGFSNSSVSIIRAPMFSWIHRSAEFNNIIPSSQITQIPLTKSTNLGSGTSVVKGPGFTGGDILRRTSPGQISTLRVNITAPLSQRYRVRIRYASTTNLQFHTSIDGRPINQGNFSATMSSGSNLQSGSFRTVGFTTPFNFSNGSSVFTLSAHVFNSGNEVYIDRIEFVPAEVTFEAEYDLERAQKAVNELFTSSNQIGLKTDVTDYHIDQVSNLVECLSDEFCLDEKKELSEKVKHAKRLSDERNLLQDPNFRGINRQLDRGWRGSTDITIQGGDDVFKENYVTLLGTFDECYPTYLYQKIDESKLKAYTRYQLRGYIEDSQDLEIYLIRYNAKHETVNVPGTGSLWPLSAPSPIGKCAHHSHHFSLDIDVGCTDLNEDLGVWVIFKIKTQDGHARLGNLEFLEEKPLVGEALARVKRAEKKWRDKREKLEWETNIVYKEAKESVDAVFVNSQYDRLQADTNIAMIHAADKRVHSIREAYLPELSVIPGVNAAIFEELEGRIFTAFSLYDARNVIKNGDFNNGLSCWNVKGHVDVEEQNNHRSVLVVPEWEAEVSQEVRVCPGRGYILRVTAYKEEYGEGCVTIHEIENNTAELKFSNCVEEEVYPNNTVTCNDYTATQEEYEGTYTSRNRGYDGAYESNSSVPADYASAYEEKAYTDGRRDNPCESNRGYGDYTPLPAGYVTRELEYFPETDKVWIEIGETEGTFIVDSVELLLMEE

SEQ ID NO: 75 - protein, 1156 aa, Bacillus thuringiensis WB9
MDNNPNINECIPYNCLSNPEVEVLGGERIETGYTPIDISLSLTQFLLSEFVPGAGFVLGLVDIIWGIFGPSQWDAFLVQIEQLINQRIEEFARNQAISRLEGLSNLYQIYAESFREWEADPTNPALREEMRIQFNDMNSALTTAIPLFAVQNYQVPLLSVYVQAANLHLPVLRDVSVFGQRWGFDAATINSRYNDLTRLIGNYTDHAVRWYNTGLERVWGPDSRDWIRYNQFRRELTLTVLDIVSLFPNYDSRTYPIRTVSQLTREIYTNPVLENFDGSFRGSAQGIEGSIRSPHLMDILNSITIYTDAHRGEYYWSGHQIMASPVGFSGPEFTFPLYGTMGNAAPQQRIVAQLGQGVYRTLSSTLYRRPFNIGINNQQLSVLDGTEFAYGTSSNLPSAVYRKSGTVDSLDEIPPQNNNVPPRQGFSHRLSHVSMFRSGFSNSSVSIIGAPMFSWIHRSAEFNNIIPSSQITQIPLTKSTNLGSGTSVVKGPGFTGGDILRRTSPGQISTLRVNITAPLSQRYRVRIRYASTTNLQFHTSIDGRPINQGNFSATMSSGSNLQSGSFRTVGFTTPFNFSNGSSVFTLSAHVFNSGNEVYIDRIEFVPAEVTFEAEYDLERAQKAVNELFTSSNQIGLKTDVTDYHIDQVSNLVECLSDEFCLDEKKELSEKVKHAKRLSDERNLLQDPNFRGINRQLDRGWRGSTDITIQGGDDVFKENYVTLLGTFDECYPTYLYQKIDESKLKAYTRYQLRGYIEDSQDLEIYLIRYNAKHETVNVPGTGSLWPLSAPSPIGKCGAHHSHHFSLDIDVGCTDLNEDLGVWVIFKIKTQDGHARLGNLEFLEEKPLVGEALARVKRAEKKWRGKREKLEWETNIVYKEAKESVDALFVNSQYDRLQADTNIAMIHAADKRVHSIREAYLPELSVIPGVNAAIFEELEGRIFTAFSLYDARNVIKNGDFNNGLSCWNVKGHVDVEEQNNHRSVLVVPEWEAEVSQEVRVCPGRGYILRVTAYKEGYGEGCVTIHEIENNTDELKFSNCVEEEVYPNNTVTCNDYTATQEEYEGTYTSRNRGYDGAYESNSSVPADYASAYEEKAYTDGRRDNPCESNRGYGDYTPLPAGYVTKELEYFPETDKVWIEIGETEGTFIVDSVELLLMEE

SEQ ID NO: 76 - protein, 1177 aa, Bacillus thuringiensis
MDNNPNINECIPYNCLSNPEVEVLGGERIETGYTPIDISLSLTQFLLSEFVPGAGFVLGLVDIIWGIFGPSQWDAFLVQIEQLINQRIEEFARNQAISRLEGLSNLYQIYAESFREWEADPTNPALREEMRIQFNDMNSALTTAIPLFAVQNYQVPLLSVYVQAANLHLSVLRDVSVFGQRWGFDAATINSRYNDLTRLIGNYTDYAVRWYNTGLERVWGPDSRDWIRYNQFRRELTLTVLDIVSLFPNYDSRTYPIRTVSQLTREIYTNPVLENFDGSFRGSAQGIEGSIRSPHLMDILSSITIYTDAHRGEYYWSGHQIMASPVGFSGPEFTFPLYGTMGNAAPQQRIVAQLGQGVYRTLSSTLYRRPFNIGINNQQLSVLDGTEFAYGTSSNLPSAVYRKSGTVDSLDEIPPQNNNVPPRQGFSHRLSHVSMFRSGFSNSSVSIIRAPMFSWIHRSAEFNNIIPSSQITQIPLTKSTNLGSGTSVVKGPGFTGGDILRRTSPGQISTLRVNITAPLSQRYRVRIRYASTTNLQFHTSIDGRPINQGNFSATMSSGSNLQSGSFRTVGFTTPFNFSNGSSVFTLSAHVFNSGNEVYIDRIEFVPAEVTFEAEYDLERAQKAVNELFTSSNQIGLKTDVTDYHIDQVSNLVECLSDEFCLDEKQEVSEKVKHAKRLSDERNLLQDPNFRGINRQLDRGWRGSTDITIQGGDDVFKENYVTLPGTFDECYPTYLYQKIDESKLKAYTRYQLRGYIEDSQDLEIYLIRYNAKHETVNVPGTGSLWPLSAQSPIGKCGEPNRCAPHLEWNPDLDCSCRDGEKCAHHSHHFSLDIDVGCTDLNEDLGVWVIFKIKTQDGHARLGNLEFLEEKPLVGEALARVKRAEKKWRDKREKLEWETNIVYKEAKESVDALFVNSQYDQLQADTNIAMIHAADKRVHSIREAYLPELSVIPGVNAAIFEELEGCIFTAFSLYDARNVIKNGDFNNGLSCWNVKGHVDVEEQNNHRSVLVVPEWEAEVSQEVRVCPGRGYILRVTAYKEGYGEGCVTIHEIENNTDELKFSNCVEEEIYPNNTVTCNDYTVNQEEYEGAYTSRNRGYNEAPSVPADYASVYEEKSYTDGRRENPCEFNRGYRDYTLLPVGYVTKELEYFPETDKVWIEIGETEGTFIVDSVELLLMEE

SEQ ID NO: 77 - protein, 1155 aa, Bacillus thuringiensis X-2
MDNNPNINECIPYNCLSNPEVEVLGGERIETGYTPIDISLSLTQFLLSEFVPGAGFVLGLVDIIWGIFGPSQWDAFLVQIEQLINQRIEEFARNQAISRLEGLSNLYQIYAESFREWEADPTNPALREEMRIQFNDMNSALTTAIPLFAVQNYQVPLLSVYVQAANLHLSVLRDVSVFGQRWGFDAATINSRYNDLTRLIGNYTDHAVRWYNTGLERVWGPDSRDWIRYNQFRRELTLTVLDIVSLFPNYDSRTYPIRTVSQLTREIYTNPVLENFDGSFRGSAQGIEGSIRSPHLMDILNSITIYTDAHRGEYYWSGHQIMASPVGFSGPEFTFPLYGTMGNAAPQQRIVAQLGQGVYRTLSSTLYRRPFNIGINNQQLSVLDETEFAYGTSSNLPSAVYRKSGTVDSLDEIPPQNNNVPPRQGFSHRLSHVSMFRSGFSNSSVSIIRAPMFSWIHRSAEFNNIIPSSQITQIPLTKSTNLGSGTSVVKGPGFTGGDILRRTSPGQISTLRVNITAPLSQRYRVRIRYASTTNLQFHTSIDGRPINQGNFSATMSSGSNLQSGSFRTVGFTTPFNFSNGSSVFTLSAHVFNSGNEVYIDRIEFVPAEVTFEAEYDLERAQKAVNELFTSFNQIGLKTDVTDYHIDQVSNLVECLSDEFCLDEKKELSEKVKHAKRLSDERNLLQDPNFRGINRQLDRGWRGSTDITIQGGDDVFKENYVTLLGTFDECYPTYLYQKIDESKLKAYTRYQLRGYIEDSQDLEIYLIRYNAKHETVNVPGTGSLWPLSAPSPIGKCAHHSHHFSLDIDVGCTDLNEDLGVWVIFKIKTQDGHARLGNLEFLEEKPLVGEALARVKRAEKKWRDKREKLEWETNIVYKEAKESVDALFVNSQYDRLQADTNIAMIHPADKRVHSIREAYLPELSVIPGVNAAIFEELEGRIFTAFSLYDARNVIKNGDFNNGLSCWNVKGHVDVEEQNNHRSVLVVPEWEAEVSQEVRVCPGRGYILRVTAYKEGYGEGCVTIHEIENNTDELKFSNCVEEEVYPNNTVTCNDYTATQEEYEGTYTSRNRGYDGAYESNSSVPADYASAYEEKAYTDGRRDNPCESNRGYGDYTPLPAGYVTKELEYFPETDKVWIEIGETEGTFIVDSVELLLMKE

SEQ ID NO: 78 - protein, 1156 aa, Bacillus thuringiensis kurstaki
MDNNPNINECIPYNCLSNPEVEVLGGERIETGYTPIDISLSLTQFLLSEFVPGAGFVLGLVDIIWGIFGPSQWDAFLVQIEQLINQRIEEFARNQAISRLEGLSNLYQIYAESFREWEADPTNPALREEMRIQFNDMNSALTTAIPLFAVQNYQVPLLSVYVQAANLHLSVLRDVSVFGQRWGFDAATINSRYNDLTRLIGNYTDHRVRWYNTGLERVWGPDSRDWIRYNQFRRELTLTVLDIVSLFPNYDSRTYPIRTVSQLTREIYTNPVLENFDGSFRGSAQGIEGSIRSPHLMDILNSITIYTDAHRGEYYWSGHQIMASPVGFSGPEFTFPLYGTMGNAAPQQRIVAQLGQGVYRTLSSTLYRRPFNIGINNQQLSGPDGGRICLWNLLKFGQPPYTEKAEPVDSPDEIPPQNNNVPPRQGFSHRCLAYVSMFYSGFSNSSVSVIRAPNDSSWTYCSAEFGDVIPSSQITQIPLTKLQSWLWNSVVKGLGFTGGDILEELTGQISTLRVNITAPLSQRYRVRIRYASTTNLQFHTSIDGRPINQGNFSATMSSGSNLQSGSFRTVGFTTPFNFSNGSSVFTLSAHVFNSGNEVYIDRIEFVPAEVTFEAEYDLERAQKAVNELFTSSNQIGLKTDVTDYHIDQVSNLVECLSDEFCLDEKKELSEKVKHAKRLSDERNLLQDPNFRGINRQLDRGWRGNTDITIQGGHDVFKENYVTLLGTFDECYPTYLYQKIDESKLKAYTRYQLRGYIEDSQDLEIYLIRYNAKHETVNVPGTGSLWPLSAPSPIGKCAHHSHHFSLDIDVGCTDLNEDLGVWVIFKIKTQDGHARLGNLEFLEEKPLVGEALARVKRAEKKWRDKREKLEWETNIVYKEAKESVDALFVNSQYDRLQADTNIAMIHAADKRVHSIREAYLPELSVIPGVNAAIFEELEGRIFTAFSLYDARNVIKNGDFNNGLSCWNVKGHVDVEEQNNHRSVLVVPEWEAEVSQEVRVCPGRGYILRVTAYKEGYGEGCVTIHEIENNTDELKFSNCVEEEVYPNNTVTCNDYTATQEEYEGTYTSRNRGYDGAYESNSSVPADYASAYEEKAYTDGRRDNPCESNRGYGDYTPLPAGYVTKELEYFPETDKVWIEIGETEGTFIVDSVELLLMEE

SEQ ID NO: 79 - protein, 1155 aa, Bacillus thuringiensis C008
MDNNPNINECIPYNCLSNPEVEVLGGERIETGYTPIDISLSLTQFLLSEFVPGAGFVLGLVDIIWGIFGPSQWDAFLVQIEQLINQRIEEFARNQAISRLEGLSNLYQIYAESFREWEADPTNPALREEMRIQFNDMNSALTTAIPLFAVQNYQVPLLSVYVQAANLHLSVLRDVSVFGQRWGFDAATINSRYNDLTRLIGNYTDHAVRWYNTGLERVWGPDSRDWIRYNQFRRELTLTVLDIVSLFPNYDSRTYPIRTVSQLTREIYTNPVLENFDGSFRGSAQGIEGSIRSPHLMDILNSITIYTDAHRGEYYWSGHQIMASPVGFSGPEFTFPLYGTMGNAAPQQRIVAQLGQGVYRTLSSTLYRRPFNIGINNQQLSVLDGTEFAYGTSSNLPSAVYRKSGTVDSLDEIPPQNNNVPPRQGFSHRLSHVSMFRSGFSNSSVSIIRAPMFSWIHRSAEFNNIIPSSQITQIPLTKSTNLGSGTSVVKGPGFTGGDILRRTSPGQISTLRVNITAPLSQRYRVRIRYASTTNLQFHTSIDGRPINQGNFSATMSSGSNLQSGSFRTVGFTTPFNFSNGSSVFTLSAHVFNSGNEVYIDRIEFVPAEVTFEAEYDLERAQKAVNELFTSSNQIGLKTDVTDYHIDQVSNLVECLSDEFCLDEKKELSEKVKHAKRLSDERNLLQDPNFRGINRQLDRGWRGSTDITIQGGDDVFKENYVTLLGTFDECYPTYLYQKIDESKLKAYTRYQLRGYIEDSQDLEIYLIRYNAKHETVNVPGTGSLWPLSAPSPIGKCAHHSHHFSLDIDVGCTDLNEDLGVWVIFKIKTQDGHARLGNLEFLEEKPLVGEALARVKRAEKKWRDKREKLEWETNIVYKEAKESVDALFVNSQYDRLQADTNIAMIHAADKRVHSIREAYLPELSVIPGVNAAIFEELEGRIFTAFSLYDARNVIKNGDFNNGLSCWNVKGHVDVEEQNNHRSVLVVPEWEAEVSQEVRVCPGRGYILRVTAYKEGYGEGCVTIHEIENNTDELKFSNCVEEEVYPNNTVTCNDYTATQEEYEGTYTSRNPGYDGAYESNSSVPADYASAYEEKAYTDGRRDNPCESNRGYGDYTPLPAGYVTKELEYFPETDKVWIEIGETEGTFIVDSVELLLMEE

SEQ ID NO: 80 - protein, 1155 aa, Bacillus thuringiensis IS5056
MDNNPNINECIPYNCLSNPEVEVLGGERIETGYTPIDISLSLTQFLLSEFVPGAGFVLGLVDIIWGIFGPSQWDAFLVQIEQLINQRIEEFARNQAISRLEGLSNLYQIYAESFREWEADPTNPALREEMRIQFNDMNSALTTAIPLFAVQNYQVPLLSVYVQAANLHLSVLRDVSVFGQRWGFDAATINSRYNDLTRLIGNYTDHAVRWYNTGLERVWGPDSRDWIRYNQFRRELTLTVLDIVSLFPNYDSRTYPIRTVSPLTREIYTNPVLENFDGSFRGSAQGIEGSIRSPHLMDILNSITIYTDAHRGEYYWSGHQIMASPVGFSGPEFTFPLYGTMGNAAPQQRIVAQLGQGVYRTLSSTLYRRPFNIGINNQQLSVLDGTEFAYGTSSNLPSAVYRKSGTVDSLDEIPPQNNNVPPRQGFSHRLSHVSMFRSGFSNSSVSIIRAPMFSWIHRSAEFNNIIPSSQITQIPLTKSTNLGSGTSVVKGPGFTGGDILRRTSPGQISTLRVNITAPLSQRYRVRIRYASTTNLQFHTSIDGRPINQGNFSATMSSGSNLQSGSFRTVGFTTPFNFSNGSSVFTLSAHVFNSGNEVYIDRIEFVPAEVTFEAEYDLERAQKAVNELFTSSNQIGLKTDVTDYHIDQVSNLVECLSDEFCLDEKKELSEKVKHAKRLSDERNLLQDPNFRGINRQLDRGWRGSTDITIQGGDDVFKENYVTLLGTFDECYPTYLYQKIDESKLKAYTRYQLRGYIEDSQDLEIYLIRYNAKHETVNVPGTGSLWPLSAPSPIGKCAHHSHHFSLDIDVGCTDLNEDLGVWVIFKIKTQDGHARLGNLEFLEEKPLVGEALARVKRAEKKWRDKREKLEWETNIVYKEAKESVDALFVNSQYDRLQADTNIAMIHAADKRVHSIREAYLPELSVIPGVNAAIFEELEGRIFTAFSLYDARNVIKNGDFNNGLSCWNVKGHVDVEEQNNHRSVLVVPEWEAEVSQEVRVCPGRGYILRVTAYKEGYGEGCVTIHEIENNTDELKFSNCVEEEVYPNNTVTCNDYTATQEEYEGTYTSRNRGYDGAYESNSSVPADYASAYEEKAYTDGRRDNPCESNRGYGDYTPLPAGYVTKELEYFPETDKVWIEIGETEGTFIVDSVELLLMEE

SEQ ID NO: 81 - protein, 1155 aa, Bacillus thuringiensis S2491Ab
MDNNPNINECIPYNCLSNPEVEVLGGERIETGYTPIDISLSLTQFLLSEFVPGAGFVLGLVDIIWGIFGPSQWDAFLVQIEQLINQRIEEFARNQAISRLEGLSNLYQIYAESFREWEADPTNPALREEMRIQFNDMNSALTTAIPLFAVQNYQVPLLSVYVQAANLHLSVLRDVLVFGQRWGFDAATINSRYNDLTRLIGNYTDHAVRWYNTGLERVWGPDSRDWIRYNQFRRELTLTVLDIVSLFPNYDSRTYPIRTVSQLTREIYTNPVLENFDGSFRGSAQGIEGSIRSPHLMDILNSITIYTDAHRGEYYWSGHQIMASPVGFSGPEFTFPLYGTMGNAAPQQRIVAQLGQGVYRTLSSTLYRRPFNIGINNQQLSVLDGTEFAYGTSSNLPSAVYRKSGTVDSLDEIPPQNNNVPPRQGFSHRLSHVSMFRSGFSNSSVSIIRAPMFSWIHRSAEFNNIIPSSQITQIPLTKSTNLGSGTSVVKGPGFTGGDILRRTSPGQISTLRVNITAPLSQRYRVRIRYASTTNLQFHTSIDGRPINQGNFSATMSSGSNLQSGSFRTVGFTTPFNFSNGSSVFTLSAHVFNSGNEVYIDRIEFVPAEVTFEAEYDLERAQKAVNELFTSSNQIGLKTDVTDYHIDQVSNLVECLSDEFCLDEKKELSEKVKHAKRLSDERSLLQDPNFRGINRQLDRGWRGSTDITIQGGDDVFKENYVTLLGTFDECYPTYLYQKIDESKLKAYTRYQLRGYIEDSQDLEIYLIRYNAKHETVNVPGTGSLWPLSAPSPIGKCAHHSHHFSLDIDVGCTDLNEDLGVWEIFKIKTQDGHARLGNLEFLEEKPLVGEALARVKRAEKKWRDKREKLEWETNIVYKEAKESVDALFVNSQYDRLQADTNIAMIHAADKRVHSIREAYLPELSVIPGVNAAIFEELEGRIFTAFSLYDARNVIKNGDFNNGLSCWNVKGHVDVEEQNNHRSVLVVPEWEAEVSQEVRVCPGRGYILRVTAYKEGYGEGCVTIHEIENNTDELKFSNCVEEEVYPNNTVTCNDYTATQEEYEGTYTSRNRRYDGAYESNFSVPADYASAYEEKAYTDGRRDNPCESNRGYGDYTPLPAGYVTKELECFPETDKVWIEIGETEGTFIVDSVELLLMEE

SEQ ID NO: 82 - protein, 1154 aa, Bacillus thuringiensis LS-R-30
MDNNPNINECIPYNCLSNPEVEVLGGERIETGYTPIDISLSLTQFLLSEFVPGAGFVLGLVDIIWGIFGPSQWDAFLVQIEQLINQRIEEFARNQAISRLEGLSNLYQIYAESFREWEADPTNPALREEMRIQFNDMNSALTTAIPLFAVQNYQVPLLSVYVQAANLHLSVLRDVSVFGQRWGFDAATINSRYNDLTRLIGNYTDHAVRWYNTGLERVWGPDSRDWIRYNQFRRELTLTVLDIVSLFPNYDSRTYPIRTVSQLTREIYTNPVLENFDGSFRGSAQGIEGSIRSPHLMDILNSITIYTDAHRGEYYWSGHQIMASPVGFSGPEFTFPLYGTMGNAAPQQRIVAQLGQGVYRTLSSTLYRRPFNIGINNQQLSVLDGTEFAYGTSSNLPSAVYRKSGTVDSLDEIPPQNNNVPPRQGFSHRLSHVSMFRSGFSNSSVSIIRAPMFSWIHRSAEFNNIIPSSQITQIPLTKSTNLGSGTSVVKGPGFTGGDILRRTSPGQISTLRVNITAPLSQRYRVRIRYASTTNLQFHTSIDGRPINQGNFSATMSSGSNLQSGSFRTVGFTTPFNFSNGSSVFTLSAHVFNSGNEVYIDRIEFVPAEVTFEAEYDLERAQKAVNELFTSSNQIGLKTDVTDYHIDQVSNLVECLSDEFCLDEKKELSEKVKHAKRLSDERNLLQDPNFRGINRQLDRGWRGSTDITIQGGDDVFKENYVTLLGTFDECYPTYLYQKIDESKLKAYTRYQLRGYIEDSQDLEIYLIRYNAKHETVNVPGTGSLWPLSAPSPIGKCAHHSHHFSLDIDVGCTDLNEDLGVWVIFKIKTQDGHARLGNLEFLEEKPLVGEALARVKRAEKKWRDKREKLEWETNIVYKEAKESVDALFVNSQYDRLQADTNIAMIHAADKRVHSIREAYLPELSVIPGVNAAIFEELEGRIFTAFSLYDARNVIKNGDFNNGLSCWNVKGHVDVEEQNNHRSVLVVPEWEAEVSQEVRVCPGRGYILRVTAYKEGYGEGCVTIHEIENNTDELKFSNCVEEEVYPNNTVTCNDYTATQEEYEGTYTSRNRGYDGAYESNSSVPADYASAYEEKAYTDGRRDNPCESNRGYGDYTPLPAGYVTKELEYFPETDKVWIEIGETEGTFIVDSVELLLME

SEQ ID NO: 83 - protein, 1155 aa, Bacillus thuringiensis serovar kurstaki
  misc_feature: Xaa is Ala, Arg, Asn, Asp, Asx, Cys, Glu, Gln, Glx, Gly, His, Ile, Leu, Lys, Met, Phe, Pro, Ser, Thr, Trp, Tyr, or Val.
MDNNPNINECIPYNCLSNPEVEVLGGERIETGYTPIDISLSLTQFLLSEFVPGAGFVLGLVDIIWGIFGPSQWDAFLVQIEQLINQRIEEFARNQAISRLEGLSNLYQIYAESFREWEADPTNPALREEMRIQFNDMNSALTTAIPLFAVQNYQVPLLSVYVQAANLHLSVLRDVSVFGHRWGFDAATINSRYNDLTRLIGNYTDHAVRWYNTGLERVWGPDSRDWIRYNQFRRELTLTVLDIVSLFPNYDSRTYPIRTVSQLTREIYTNPVLENFDGSFRGSAQGIEGSIRSPHLMDILNSITIYTDAHRGEYYWSGHQIMASPVGFSGPESTFPLYGTMGNAAPQQRIVAQLGQGVYRTLSSTLYRRPFNIGINNQQLSVLDGTEFAYGTSSNLPSAVYRKSGTVDSLDEIPPQNNNVPPRQGFSHRLSHVSMFRSGFSNSSVSIIRAPMFSWIHRSAEFNNIIPSSQITQIPLTKSTNLGSGTSVVKAPGFTGGDILRRTSPGQISTLRVNITAPLSQRYRVRIRYASTTNLQFHTSIDGRPINQGNFSATMSSGSNLQSGSFRTVGFTTPFNFSNGSSVFTLSAHVFNSGNEVYIDRIEFVPAEVTFEAEYDLERAQKAVNELFTSSNQIGLKTDVTDYHIDQVSNLVECLSDEFCLDEKKELSEKVKHAKRLSDERNLLQDPNFRGINRQLDRGWRGSTDITIQGGDDVFKENYVTLLGTFDECYPTYLYQKIDESKLKAYTRYQLRGYIEDSQDLDIYLIRYNAKHETVNVPGTGSLWPLSAPSPIGKCAHHSHHFSLDIDVGCTDLNEDLGVWVIFKIKTQDGHARLGNLEFLEEKPLVGEALARVKRAEKKWRDKREKLEWETNIVYKEAKESVDALFVNSQYDRLQADTNIAMIHAADERVHSIREAYLPELSVIPGVNAAIFEELEGRIFTAFSLYDARNVIKNGDFNNGLSCWNVKGHVDVEEQNNHRSVLVVPEWEAEVSQEVRVCPGRGYILRVTAYKEGYGEGCVTIHEIENNTDEPKFSYCVEEEVYPNNTVTCNDYTATQEEYEGTYTSRNRGYDGAYESNSSVPADYASAYEEKAYTDGRRDNPCESNRGYGDYTPLPAGYVTKELEYFPETDKVWIEIGETEGTFIVDSVELLLMEE

SEQ ID NO: 84 - protein, 1155 aa, Bacillus thuringiensis kurstaki HD1; identical to SEQ ID NO: 69

SEQ ID NO: 85 - protein, 1155 aa, Bacillus thuringiensis kurstaki HD1; identical to SEQ ID NO: 69

SEQ ID NO: 86 - protein, 1155 aa, Bacillus thuringiensis berliner 1715
MDNNPNINECIPYNCLSNPEVEVLGGERIETGYTPIDISLSLTQFLLSEFVPGAGFVLGLVDIIWGIFGPSQWDAFLVQIEQLINQRIEEFARNQAISRLEGLSNLYQIYAESFREWEADPTNPALREEMRIQFNDMNSALTTAIPLFAVQNYQVPLLSVYVQAANLHLSVLRDVSVFGQRWGFDAATINSRYNDLTRLIGNYTDHAVRWYNTGLERVWGPDSRDWIRYNQFRRELTLTVLDIVSLFPNYDSRTYPIRTVSQLTREIYTNPVLENFDGSFRGSAQGIEGSIRSPHLMDILNSITIYTDAHRGEYYWSGHQIMASPVGFSGPEFTFPLYGTMGNAAPQQRIVAQLGQGVYRTLSSTLYRRPFNIGINNQQLSVLDGTEFAYGTSSNLPSAVYRKSGTVDSLDEIPPQNNNVPPRQGFSHRLSHVSMFRSGFSNSSVSIIRAPMFSWIHRSAEFNNIIPSSQITQIPLTKSTNLGSGTSVVKGPGFTGGDILRRTSPGQISTLRVNITAPLSQRYRVRIRYASTTNLQFHTSIDGRPINQGNFSATMSSGSNLQSGSFRTVGFTTPFNFSNGSSVFTLSAHVFNSGNEVYIDRIEFVPAEVTFEAEYDLERAQKAVNELFTSSNQIGLKTDVTDYHIDQVSNLVECLSDEFCLDEKKELSEKVKHAKRLSDERNLLQDPNFRGINRQLDRGWRGSTDITIQGGDDVFKENYVTLLGTFDECYLTYLYQKIDESKLKAYTRYQLRGYIEDSQDLEIYLIRYNAKHETVNVPGTGSLWRLSAPSPIGKCAHHSHHFSLDIDVGCTDLNEDLGVWVIFKIKTQDGHARLGNLEFLEEKPLVGEALARVKRAEKKWRDKREKLEWETNIVYKEAKESVDALFVNSQYDRLQADTNIAMIHAADKRVHSIREAYLPELSVIPGVNAAIFEELEGRIFTAFSLYDARNVIKNGDFNNGLSCWNVKGHVDVEEQNNHRSVLVVPEWEAEVSQEVRVCPGRGYILRVTAYKEGYGEGCVTIHEIENNTDELKFSNCVEEEVYPNNTVTCNDYTATQEEYEGTYTSRNRGYDGAYESNSSVPADYASAYEEKAYTDGRRDNPCESNRGYGDYTPLPAGYVTKELEYFPETDKVWIEIGETEGTFIVDSVELLLMEE

SEQ ID NO: 87 - protein, 1155 aa, Bacillus thuringiensis kurstaki NRD-12
MDNNPNINECIPYNCLSNPEVEVLGGERIETGYTPIDISLSLTQFLLSEFVPGAGFVLGLVDIIWGIFGPSQWDAFLVQIEQLINQRIEEFARNQAISRLEGLSNLYQIYAESFREWEADPTNPALREEMRIQFNDMNSALTTAIPLFAVQNYQVPLLSVYVQAANLHLSVLRDVSVFGQRWGFDAATINSRYNDLTRLIGNYTDHAVRWYNTGLERVWGPDSRDWIRYNQFRRELTLTVLDIVSLFPNYDSRTYPIRTVSQLTREIYTNPVLENFDGSFRGSAQGIEGSIRSPHLMDILNSITIYTDAHRGEYYWSGHQIMASPVGFSGPEFTFPLYGTMGNAAPQQRIVAQLGQGVYRTLSSTLYRRPFNIGINNQQLSVLDGTEFAYGTSSNLPSAVYRKSGTVDSLDEIPPQNNNVPPRQGFSHRLSHVSMFRSGFSNSSVSIIRAPMFSWIHRSANFNNIIPSSQITQIPLTKSTNLGSGTSVVKGPGFTGGDILRRTSPGQISTLRVNITAPLSQRYRVRIRYASTTNLQFHTSIHGRPINQGNFSATMSSGSNLQSGSFRHLGFTTPFNFSNGSSVFTLSAHVFNSGNEVYIDRIEFVPAEVTFEAEYDLERAQKAVNELFTSSNQIGLKTDVTDYHIDQVSNLVECLSDEFCLDEKEELSEKVKHANGLSDERNLLQDPNFRGINRQLDRGWRGSTDITIQGGDDVFKENYVTLLGTFDECYPTYLYQKIDESKLKAYTRYQLRGYIEDSQDLEIYLIRYNAKHETVNVPGTGSLWPLSAPSPIGKCAHHSHHFSLDIDVGCTDLNEDLGVWVIFKIKTQDGHARLGILEFLEEKPLVGEALARVKRAEKKWRDKREKLEWETNIVYKEAKESVDALFVNSQYDRLQADTNIAMIHAADKRVHSIREAYLPELSVIPGVNAAIFEELEGRIFTAFSLYDARNVIKNGDFNNGLSCWNVKGHVDVEEQNNHRSVLVVPEWEAEVSQEVRVCPGRGYILRVTAYKEGYGTGCVTIHEIENNTDELKFSNCVEEEVYPNNTVTCNDYTATQEEYGGTYTSRNRGYDGAYESNSSVPADYASAYEEKAYTDGRRDNPCESNRGYGDYTPLPAGYVTKELEYFPETDKVWIEIGETEGTFIVDSVELLLMEE

SEQ ID NO: 88 - protein, 1155 aa, Bacillus thuringiensis aizawai IC1
MDNNPNINECIPYNCLSNPEVEVLGGERIETGYTPIDISLSLTQFLLSEFVPGAGFVLGLVDIIWGIFGPSQWDAFLVQIEQLINQRIEEFARNQAISRLEGLSNLYQIYAESFREWEADPTNPALREEMRIQFNDMNSALTTAIPLFAVQNYQVPLLSVYVQAANLHLSVLRDVSVFGQRWGFDAATINSRYNDLTRLIGNYTDHAVRWYNTGLERVWGPDSRDWIRYNQFRRELTLTVLDIVSLFPNYDSRTYPIRTVSQLTREIYTNPVLENFDGSFRGSAQGIEGSIRSPHLMDILNSITIYTDAHRGEYYWSGHQIMASPVGFSGPEFTFPLYGTMGNAAPQQRIVAQLGQGVYRTLSSTLYRRPFNIGINNQQLSVLDGTEFAYGTSSNLPSAVYRKSGTVDSLDEIPPQNNNVPPRQGFSHRLSHVSMFRSGFSNSSVSIIRPPMFSWIHRSAEFNNIIPSSQITQIPLTKSTNLGSGTSVVKGPGFTGGDILRRTSPGQISTLRVNITAPLSQRYRVRIRYASTTNLQLHTSIDGRIINQGNFSATMSSGSNLQSGSFRIVGFTTPFNFSNGSSVFTLSAHVFNSGNEVYIDRIEFVPAEVTFEAEYDLERAQKAVNELFTSSNQIGLKTDVTDYHIDQVSNLVECLSDEFCLDEKKELSEKVKHAKRLSDERNLLQDPNFRGINRQLDRGWRGSTDITIQGGDDVFKENYVTLLGTFDECYLTYLYQKIDESKLKAYTRYQLRGYIEDSQDLEIYLIRYNAKHETVNVPGTGSLWRLSAPSPIGKCAHHSHHFSLDIDVGCTDLNEDLGVWVIFKIKTQDGHARLGNLEFLEEKPLVGEALARVKRAEKKWRDKREKLEWETNIVYKEAKESVDALFVNSQYDRLQADTNIAMIHAADKRVHSIREAYLPELSVIPGVNAAIFEELEGRIFTAFSLYDARNVIKNGDFNNGLSCWNVKGHVDVEEQNNHRSVLVVPEWEAEVSQEVRVCPGRGYILRVTAYKEGYGEGCVTIHEIENNTDELKFSNCVEEEVYPNNTVTCNDYTATQEEYEGTYTSRNRGYDGAYESNSSVPADYASAYEEKAYTDGRRDNPCESNRGYGDYTPLPAGYVTKELEYFPETDKVWIEIGETEGTFIVDSVELLLMEE

SEQ ID NO: 89 - protein, 1155 aa, Bacillus thuringiensis aizawai IPL7
MDNNPNINECIPYNCLSNPEVEVLGGERIETGYTPIDISLSLTQFLLSEFVPGAGFVLGLVDIIWGIFGPSQWDAFLVQIEQLINQRIEEFARNQAISRLEGLSNLYQIYAESFREWEADPTNPALREEMRIQFNDMNSALTTAIPLFAVQNYQVPLLSVYVQAANLHLSVLRDVSVFGQRWGFDAATINSRYNDLTRLIGNYTDHAVRWYNTGLERVWGPDSRDWIRYNQFRRELTLTVLDIVSLFPNYDSRTYPIRTVSQLTREIYTNPVLENFDGSFRALAQGIEGSIRSPHLMDILNSITIYTDAHRGEYYWSGHQIMASPVGFSGPEFTFPLYGTMGNAAPQQRIVAQLGQGVYRTLSSTLYRRPFNIGINNQQLSVLDGTEFAYGTSSNLPSAVYRKSGTVDSLDEIPPQNNNVPPRQGFSHRLSHVSMFRSGFSNSSVSIIRAPMFSWIHRSAEFNNIIPSSQITQIPLTKSTNLGSGTSVVKGPGFTGGDILRRTSPGQISTLRVNITAPLSQRYRVRIRYASTTNLQFHTSIDGRPINQGNFSATMSSGSNLQSGSFRTVGFTTPFNFSNGSSVFTLSAHVFNSGNEVYIDRIEFVPAEVTFEAEYDLERAQKAVNELFTSSNQIGLKTDVTDYHIDQVSNLVECLSDEFCLDEKKELSEKVKHAKRLSDERNLLQDPNFRGINRQLDRGWRGSTDITIQGGDDVFKENYVTLLGTFDECYPTYLYQKIDESKLKAYTRYQLRGYIEDSQDLEIYLIRYNAKHETVNVPGTGSLWPLSAPSPIGKCAHHSHHFSLDIDVGCTDLNEDLGVWVIFKIKTQDGHARLGNLEFLEEKPLVGEALARVKRAEKKWRDKREKLEWETNIVYKEAKESVDALFVNSQYDRLQADTNIAMIHAADKRVHSIREAYLPELSVIPGVNAAIFEELEGRIFTAFSLYDARNVIKNGDFNNGLSCWNVKGHVDVEEQNNQRSVLVVPEWEAEVSQEVRVCPGRGYILRVTAYKEGYGEGCVTIHEIENNTDELKFSNFVEEEVYPNNTVTCNDYTATQEEYEGTYTSRNRGYDGAYESNSSVPADYASAYEEKAYTDGRRDNPCESNRGYGDYTPLPAGYVTKELEYFPETDKVWIEIGETEGTFIVDSVELLLMEE

SEQ ID NO: 90 - protein, 1155 aa, Bacillus thuringiensis aizawai HD133; identical to SEQ ID NO: 69

SEQ ID NO: 91 - protein, 1118 aa, Bacillus thuringiensis kunthala RX24
MDNNLNINECIPYNCLSNPEVEVLGGERIETGYTPIDISLSLTQFLLSEFVPGAGFVLGLVDIIWGIFGPSQWDAFLVQIEQLINQRIEEFARNQAISRLEGLSNLYQIYAESFREWEADPTNPALREEMRIQFNDMNSALTTAIPLFAVQNYQVPLLSVYVQAANLHLSVLRDVSVFGQRWGFDAATINSRYNDLTRLIGNYTDHAVRWYNTGLERVWGPDSRDWIRYNQFRRELTLTVLDIVSLFPNYDSRTYPIRTVSQLTREIYTNPVLENFDGSFRGSAQGIEGSIRSPHLMDILNSITIYTDAHRGEYYWSGHQIMASPVGFSGPEFTFPLYGTMGNAAPQQRIVAQLGQGVYRTLSSTLYRRPFNIGINNQQLSVLDGTEFAYGTSSNLPSAVYRKSGTVDSLDEIPPQNNNVPPRQGFSHRLSHVSMFRSGFSNSSVSIIRAPMFSWIHRSAEFNNIIPSSQITQIPLTKSTNLGSGTSVVKGPGFTGGDILRRTSPGQISTLRVNITAPLSQRYRVRIRYASTTNLQFHTSIDGRPINQGNFSATMSSGSNLQSGAFMTVGFTTPFNFSNGSSVFTLSAHVFNSGNEVYIDRIEFVPAEVTFEAEYDLERAQKAVNELFTSSNQIGLKTDVTDYHIDQVSNLVECLSDEFCLDEKKELSEKVKHAKRLSDERNLLQDPNFRGINRQLDRGWRGSTDITIQGGDDVFKENYLTLLGTFDECFQRIYIKKVDESKFKAYTRDQLRGYIEDSQDLEIYLIRYNAKHETVNVPGTGSLWPLSAPSPIGKCAHHSHHFSLDIDVGCTDLNEDLGVWVIFKIKTQDGHARLGNLEFLEEKPLVGEALARVKRAEKKWRDKREKLEWETNIVYKEAKESVDALFVNSQYDRLQADTNIAMIHAADKRVHSIREAYLPELSVIPGVNAAIFEELEGRIFTAFSLYDARNVIKNGDFNNGLSCWNVKGHVDVEEQNNHRSVLVVPEWEAEVSQEVRVCPGRGYILRVTAYKEGYGEGCVTIHEIENNTDELKFSNCVEEEVYPNNTVTCKIILRLKKNMRVRTLLVIEDMTEPMKAILLYQLIMHQPMKKKHIQMDEETILVNLTEDMGITHHYQLAM

SEQ ID NO: 92 - protein, 1118 aa, Bacillus thuringiensis kunthala RX28
MDNNPNINECIPYNCLSNPEVEVLGGERIETGYTPIDISLSLTQFLLSEFVPGAGFVLGLVDIIWGIFGPSQWDAFLVQIEQLINQRIEEFARNQAISRLEGLSNLYQIYAESFREWEADPTNPALREEMRIQFNDMNSALTTAIPLLAVQNYQVPLLSVYVQAANLHLSVLRDVSVFGQRWGFDAATINSRYNDLTRLIGNYTDYAVRWYNTGLERVWGPDSRDWVRYNQFRREITLTVLDIVALFPNYDSRTYPIRTVSQLTREIYTNPVLENFDGSFRGSAQGTERSIRSPHLMDILNSITIYRMHIEDIIIGQGIKKRLLLEGFQGQNSLFLYLGRGEMQLHPNRLLLNKVRACIEHYRPLYIEDLFKEGINNQQLSVLDGTEFAYGTSSNLPSAVYRKSGTVDSLDEIPPQNNNVPPRQGFSHRLSHVSMFRSGFSNSSVSIIRAPMFSWIHRSAEFNNIIPSSQITQIPLTKSTNLGSGTSVVKGPGFTGGDILRRTSPGQISTLRVNITAPLSQRYRVRIRYASTTNLQFHTSIDGRPINQGNFSATMSSGSNLQSGSFRTVGFTTPFNFSNGSSVFTLSAHVFNSGNEVYIDRIEFVPAEVTFEAEYDLERAQKAVNELFTSSNQIGLKTDVTDYHIDQVSNLVECLSDEFCLDEKQELSEKVKHAKRLSDERNLLQDPNFRGINRQLDRGWRGSTDITIQGGDDVFKENYVTLLGTFDECFQRIYIKKVDESKFKAYTRDQLRGYIEDSQDLEIYLIRYNAKHETVNVPGTGSLWPLSAPSPIGKCAHHSHHFSLDIDVGCTDLNEDLGVWVIFKIKTQDGHARLGNLEFLEEKPLVGEALARVKRAEKKWRDKREKLEWETNIVYKEAKESVDALFVNSQYDRLQADTNIAMIHAADKRVHSIREAYLPELSVIPGVNAAIFEELEGRIFTAFSLYDARNVIKNGDFNNGLSCWNVKGHVDVEEQNNHRSVLVVPEWEAEVSQEVRVCPGRGYILRVTAYKEGYGEGCVTIHEIENNTDELKFSNCVEEEVYPNNTVTCKIILRLKKNMRVRTLLVIEDMTEPMKAILLYQLIMHQPMKKKHIQMDEETILVNLTEDMGITHHYQLAM

SEQ ID NO: 93 - protein, 373 aa, Bacillus thuringiensis ly4a3
RDMTVIVLDIVSLFPNYDSRTYPIRTVSQLTREIYTNPVLENFDGSFRGSAQGIEGSIRSPHLMDILNSITIYTDAHRGEYYWSGHQIMASPVGFSGPEFTFPLYGTMGNAAPQQRIVAQLGQGVYRTLSSTLYRRPFNIGINNQQLSVLDGTEFAYGTSSNLPSAVYRKSGTVDSLDEIPPQNNNVPPRQGFSHRLSHVSMFRSGFSNSSVSIIRAPMFSWIHRSAEFNNIIPSSQITQIPLTKSTNLGSGTSVVKGPGFTGGDILRRTSPGQISTLRVNITAPLSQRYRVRIRYASTTNLQFHTSIDGRPINQGNFSATMSSGSNLQSGSFRTVGFTTPFNFSNGSSVFTLSAHVFNSGNEVYIDKIEFIP

SEQ ID NO: 94 - protein, 1178 aa, Bacillus thuringiensis kurstaki HD73
MDNNPNINECIPYNCLSNPEVEVLGGERIETGYTPIDISLSLTQFLLSEFVPGAGFVLGLVDIIWGIFGPSQWDAFLVQIEQLINQRIEEFARNQAISRLEGLSNLYQIYAESFREWEADPTNPALREEMRIQFNDMNSALTTAIPLFAVQNYQVPLLSVYVQAANLHLSVLRDVSVFGQRWGFDAATINSRYNDLTRLIGNYTDYAVRWYNTGLERVWGPDSRDWVRYNQFRRELTLTVLDIVALFPNYDSRRYPIRTVSQLTREIYTNPVLENFDGSFRGSAQGIERSIRSPHLMDILNSITIYTDAHRGYYYWSGHQIMASPVGFSGPEFTFPLYGTMGNAAPQQRIVAQLGQGVYRTLSSTLYRRPFNIGINNQQLSVLDGTEFAYGTSSNLPSAVYRKSGTVDSLDEIPPQNNNVPPRQGFSHRLSHVSMFRSGFSNSSVSIIRAPMFSWIHRSAEFNNIIASDSITQIPAVKGNFLFNGSVISGPGFTGGDLVRLNSSGNNIQNRGYIEVPIHFPSTSTRYRVRVRYASVTPIHLNVNWGNSSIFSNTVPATATSLDNLQSSDFGYFESANAFTSSLGNIVGVRNFSGTAGVIIDRFEFIPVTATLEAEYNLERAQKAVNALFTSTNQLGLKTNVTDYHIDQVSNLVTYLSDEFCLDEKRELSEKVKHAKRLSDERNLLQDSNFKDINRQPERGWGGSTGITIQGGDDVFKENYVTLSGTFDECYPTYLYQKIDESKLKAFTRYQLRGYIEDSQDLEIYLIRYNAKHETVNVPGTGSLWPLSAQSPIGKCGEPNRCAPHLEWNPDLDCSCRDGEKCAHHSHHFSLDIDVGCTDLNEDLGVWVIFKIKTQDGHARLGNLEFLEEKPLVGEALARVKRAEKKWRDKREKLEWETNIVYKEAKESVDALFVNSQYDQLQADTNIAMIHAADKRVHSIREAYLPELSVIPGVNAAIFEELEGRIFTAFSLYDARNVIKNGDFNNGLSCWNVKGHVDVEEQNNQRSVLVVPEWEAEVSQEVRVCPGRGYILRVTAYKEGYGEGCVTIHEIENNTDELKFSNCVEEEIYPNNTVTCNDYTVNQEEYGGAYTSRNRGYNEAPSVPADYASVYEEKSYTDGRRENPCEFNRGYRDYTPLPVGYVTKELEYFPETDKVWIEIGETEGTFIVDSVELLLMEE

SEQ ID NO: 95 - protein, 1178 aa, Bacillus thuringiensis kurstaki YBT-1520; identical to SEQ ID NO: 94

SEQ ID NO: 96 - protein, 1178 aa, Bacillus thuringiensis
MDNNPNINECIPYNCLSNPEVEVLGGERIETGYTPIDISLSLTQFLLSEFVPGAGFVLGLVDIIWGIFGPSQWDAFLVQIEQLINQRIEEFARNQAISRLEGLSNLYQIYAESFREWEADPTNPALREEMRIQFNDMNSALTTAIPLLAVQNYQVPLLSVYVQAANLHLSVLRDVSVFGQRWGFDAATINSRYNDLTRLIGNYTDYAVRWYNTGLERVWGPDSRDWVRYNQFRRELTLTVLDIVALFPNYDSRRYPIRTVSQLTREIYTNPVLENFDGSFRGSAQGIERSIRSPHLMDILNSITIYTDAHRGYYYWSGHQIMASPVGFSGPEFTFPLYGTMGNAAPQQRIVAQLGQGVYRTLSSTFYRRPFNIGINNQQLSVLDGTEFAYGTSSNLPSAVYRKSGTVDSLDEIPPQNNNVPPRQGFSHRLSHVSMFRSGSSNSSVSIIRAPMFSWIHRSAEFNNIIASDSITQIPAVKGNFLFNGSVISGPGFTGGDLVRLNSSGNNIQNRGYIEVPIHFPSTSTRYRVRVRYASVTPIHLNVNWGNSSIFSNTVPATATSLDNLQSSDFGYFESANAFTSSLGNIVGVRNFSGTAGVIIDRFEFIPVTATLEAEYNLERAQKAVNALFTSTNQLGLKTNVTDYHIDQVSNLVTYLSDEFCLDEKRELSEKVKHAKRLSDERNLLQDSNFKDINRQPERGWGGSTGITIQGGDDVFKENYVTLSGTFDECYPTYLYQKIDESKLKAFTRYQLRGYIEDSQDLEIYLIRYNAKHETVNVPGTGSLWPLSAQSPIGKCGEPNRCAPHLEWNPDLDCSCRDGEKCAHHSHHFSLDIDVGCTDLNEDLGVWVIFKIKTQDGHARLGNLEFLEEKPLVGEALARVKRAEKKWRDKREKLEWETNIVYKEAKESVDALFVNSQYDQLQADTNIAMIHAADKRVHSIREAYLPELSVIPGVNAAIFEELEGRIFTAFSLYDARNVIKNGDFNNGLSCWNVKGHVDVEEQNNQRSVLVVPEWEAEVSQEVRVCPGRGYILRVTAYKEGYGEGCVTIHEIENNTDELKFSNCVEEEIYPNNTVTCNDYTVNQEEYGGAYTSRNRGYNEAPSVPADYASVYEEKSYTDGRRENPCEFNRGYRDYTPLPVGYVTKELEYFPETDKVWIEIGETEGTFIVDSVELLLMEE

SEQ ID NO: 97 - protein, 723 aa, Bacillus thuringiensis kurstaki HD1
MDNNPNINECIPYNCLSNPEVEVLGGERIETGYTPIDISLSLTQFLLSEFVPGAGFVLGLVDIIWGIFGPSQWDAFLVQIEQLINQRIEEFARNQAISRLEGLSNLYQIYAESFREWEADPTNPALREEMRIQFNDMNSALTTAIPLLAVQNYQVPLLSVYVQAANLHLSVLRDVSVFGQRWGFDAATINSRYNDLTRLIGNYTDYAVRWYNTGLERVWGPDSRDWVRYNQFRRELTLTVLDIVALFPNYDSRRYPIRTVSQLTREIYTNPVLENFDGSFRGSAQGIERSIRSPHLMDILNSITIYTDAHRGYYYWSGHQIMASPVGFSGPEFTFPLYGTMGNAAPQQRIVAQLGQGVYRTLSSTFYRRPFNIGINNQQLSVLDGTEFAYGTSSNLPSAVYRKSGTVDSLDEIPPQNNNVPPRQGFSHRLSHVSMFRSGSSSSVSIIRAPMFSWIHRSAEFNNIIASDSITQIPAVKGNFLFNGSVISGPGFTGGDLVRLNSSGNNIQNRGYIEVPIHFPSTSTRYRVRVRYASVTPIHLNVNWGNSSIFSNTVPATATSLDNLQSSDFGYFESANAFTSSLGNIVGVRNFSGTAGVIIDRFEFIPVTATLEAEYNLERAQKAVNALFTSTNQLGLKTNVTDYHIDQVSNLVTYLSDEFCLDEKRELSEKVKHAKRLSDERNLLQDSNFKDINRQPERGWGGSTGITIQGGDDVFKENYVTLS

SEQ ID NO: 98 - protein, 1177 aa, Bacillus thuringiensis Ly30
MDNNPNINECIPYNCLSNPEVEVLGGERIETGYTPIDISLSLTQFLLSEFVPGAGFVLGLVDIIWGIFGPSQWDAFLVQIEQLINQRIEEFARNQAISRLEGLSNLYQIYAESFREWEADPTNPALREEMRIQFNDMNSALTTAIPLLAVQNYQVPLLSVYVQAANLHLSVLRDVSVFGQRWGFDAATINSRYNDLTRLIGNYTDYAVRWYNTGLERVWGPDSRDWVRYNQFRRELTLTVLDIVALFPNYDSRRYPIRTVSQLTREIYTNPVLENFDGSFRGSAQGIERSIRSPHLMDILNSITIYTDAHRGYYYWSGHQIMASPVGFSGPEFTFPLYGTMGNAAPQQRIVAQLGQGVYRTLSSTFYRRPFNIGINNQQLSVLDGTEFAYGTSSNLPSAVYRKSGTVDSLDEIPPQNNNVPPRQGFSHRLSHVSMFRSGSSSSVSIIRAPMFSWIHRSAEFNNIIASDSITQIPAVKGNFLFNGSVISGPGFTGGDLVRLNSSGNNIQNRGYIEVPIHFPSTSTRYRVRVRYASVTPIHLNVNWGNSSIFSNTVPATATSLDNLQSSDFGYFESANAFTSSLGNIVGVRNFSGTAGVIIDRFEFIPVTATLEAEYNLERAQKAVNALFTSTNQLGLKTNVTDYHIDQVSNLVTYLSDEFCLDEKRELSEKVKHAKRLSDERNLLQDSNFKDINRQPERGWGGSTGITIQGGDDVFKENYVTLSGTFDECYPTYLYQKIDESKLKAFTRYQLRGYIEDSQDLEIYLIRYNAKHETVNVPGTGSLWPLSAQSPIGKCGEPNRCAPHLEWNPDLDCSCRDGEKCAHHSHHFSLDIDVGCTDLNEDLGVWVIFKIKTQDGHARLGNLEFLGEKPLVGEALARVKRAEKKWRDKREKLEWETNIVYKEAKESVDALFVNSQYDQLQADTNIAMIHAADKRVHSIREAYLPELSVIPGVNAAIFEELEGRIFTAFSLYDARNVIKNGDFNNGLSCWNVKGHVDVEEQNNQRSVLVVPEWEAEVSQEVRVCPGRGYILRVTAYKEGYGEGYVTIHEIENNTDELKFSNCVEEEIYPNNTVTCNDYTVNQEEYGGAYTSRSRGYNEAPSVPADYASVYEEKSYTDGRRENPCEFNRGYRDHTPLPVGYVTKELEYFPETDKVWIEIGETEGTFIVDSVELLLMEE

SEQ ID NO: 99 - protein, 1177 aa, Bacillus thuringiensis from Taiwan
MDNNPNINECIPYNCLSNPEVEVLGGERIETGYTPIDISLSLTQFLLSEFVPGAGFVLGLVDIIWGIFGPSQWDAFLVQIEQLINQRIEEFARNQAISRLEGLSNLYQIYAESFREWEADPTNPALREEMRIQFNDMNSALTTAIPLFAVQNYQVPLLSVYVQAANLHLSVLRDVSVFGQRWGFDAATINSRYNDLTRLIGNYTDYAVRWYNTGLERVWGPDSRDWVRYNQFRRELTLTVLDIVALFPNYDSRRYPIRTVSQLTREIYTNPVLENFDGSFRGSAQGIERSIRSPHLMDILNSITIYTDAHRGYYYWSGHQIMASPVGFSGPEFTFPLYGTMGNAAPQQRIVAQLGQGVYRTLSSTFYRRPFNIGINNQQLSVLDGTEFAYGTSSNLPSAVYRKSGTVDSLDEIPPQNNNVPPRQGFSHRLSHVSMFRSGSSSSVSIIRAPMFSWIHRSAEFNNIIASDSITQIPAVKGNFLFNGSVISGPGFTGGDLVRLNSSGNNIQNRGYIEVPIHFPSTSTRYRVRVRYASVTPIHLNVNWGNSSIFSNTVPATATSLDNLQSSDFGYFESANAFTSSLGNIVGVRNFSGTAGVIIDRFEFIPVTATLEAEYNLERAQKAVNALFTSTNQLGLKTNVTDYHIDQVSNLVTYLSDEFCLDEKRELSEKVKHAKRLSDERNLLQDSNFKDINRQPERGWGGSTGITIQGGDDVFKENYVTLSGTFDECYPTYLYQKIDESKLKAFTRYQLRGYIEDSQDLEIYLIRYNAKHETVNVPGTGSLWPLSAQSPIGKCGEPNRCAPHLEWNPDLDCSCRDGEKCAHHSHHFSLDIDVGCTDLNEDLGVWVIFKIKTQDGHARLGNLEFLEEKPLVGEALARVKRAEKKWRDKREKLEWETNIVYKEAKESVDALFVNSQYDQLQADTNIAMIHAADKRVHSIREAYLPELSVIPGVNAAIFEELEGRIFTAFSLYDARNVIKNGDFNNGLSCWNVKGHVDVEEQNNQRSVLVVPEWEAEVSQEVRVCPGRGYILRVTAYKEGYGEGCVTIHEIENNTDELKFSNCVEEEIYPNNTVTCNDYTVNQEEYGGAYTSRNRGYNEAPSVPADYASVYEEKSYTDGRRENPCEFNRGYRDYTPLPVGYVTKELEYFPETDKVWIEIGETEGTFIVDSVELLLMEE

SEQ ID NO: 100 - protein, 1178 aa, Bacillus thuringiensis H3
MDNNPNINECIPYNCLSNPEVEVLGGERIETGYTPIDISLSLTQFLLSEFVPGAGFVLGLVDIIWGIFGPSQWDAFLVQIEQLINQRIEEFARNQAISRLEGLSNLYQIYAESFREWEADPTNPALREEMRIQFNDMNSALTTAIPLFAVQNYQVPLLSVYVQAANLHLSVLRDVSVFGQRWGFDAATINSRYNDLTRLIGNYTDYAVRWYNTGLERVWGPDSRDWVRYNQFRRELTLTVLDIVALFPNYDSRRYPIRTVSQLTREIYTNPVLENFDGSFRGSAQGIERSIRSPHLMDILNSITIYTDAHRGYYYWSGHQIMASPVGFSGPEFTFPLYGTMGNAAPQQRIVAQLGQGVYRTLSSTLYRRPFNIGINNQQLSVLDGTEFAYGTSSNLPSAVYRKSGTVDSLDEIPPQNNNVPPRQGFSHRLSHVSMFRSGFSNSSVSIIRAPMFSWIHRSAEFNNIIASDSITQIPAVKGNFLFNGSVISGPGFTGGDLVRLNSSGNNIQNRGYIEVPIHFPSTSTRYRVRVRYASVTPIHLNVNWGNSSIFSNTVPATATSLDNLQSSDFGYFESANAFTSSLGNIVGVRNFSGTAGVIIDRFEFIPVTATLEAEYNLERAQKAVNALFTSTNQLGLKTNVTDYHIDQVSNLVTYLSDEFCLDEKRELSEKVKHAKRLSDERNLLQDSNFKDINRQPERGWGGSTGITIQGGDDVFKENYVTLSGTFDECYPTYLYQKIDESKLKAFTRYQLRGYIEDSQDLEIYLIRYNAKHETVNVPGTGSLWPLSTQSPIGKCGEPNRCAPHLEWNPDLDCSCRDGEKCAHHSHHFSLDIDVGCTDLNEDLGVWVIFKIKTQDGHARLGNLEFLEEKPLVGEALARVKRAEKKWRDKREKLEWETNIVYKEAKESVDALFVNSQYDQLQADTNIAMIHAADKRVHSIREAYLPELSVIPGVNAAIFEELEGRIFTAFSLYDARNVIKNGDFNNGLSCWNVKGHVDVEEQNNQRSVLVVPEWEAEVSQEVRVCPGRGYILRVTAYKEGYGEGCVTIHEIENNTDELKFSNCVEEEIYPNNTVTCNDYTVNQEEYGGAYTSRNRGYNEAPSVPADYASVYEEKSYTDGRRENPCEFNRGYRDYTPLPVGYVTKELEYFPETDKVWIEIGETEGTFIVDSVELLLMEE

SEQ ID NO: 101 - protein, 1177 aa, Bacillus thuringiensis kenyae HD549
MDNNPNINECIPYNCLSNPEVEVLGGERIETGYTPIDISLSLTQFLLSEFVPGAGFVLGLVDIIWGIFGPSQWDAFLVQIEQLINQRIEEFARNQAISRLEGLSNLYQIYAESFREWEADPTNPALREEMRIQFNDMNSALTTAIPLLAVQNYQVPLLSVYVQAANLHLSVLRDVSVFGQRWGFDAATINSRYNDLTRLIGNYTDYAVRWYNTGLERVWGPDSRDWVRYNQFRRELTLTVLDIVALFPNYDSRRYPIRTVSQLTREIYTNPVLENFDGSFRGSAQGIERSIRSPHLMDILNSITIYTDAHRGYYYWSGHQIMASPVGFSGPEFTFPLYGTMGNAAPQQRIVAQLGQGVYRTLSSTFYRRPFNIGINNQQLSVLDGTEFAYGTSSNLPSAVYRKSGTVDSLDEIPPQNNNVPPRQGFSHRLSHVSMFRSGSSSSVSIIRAPMFSWIHRSAEFNNIIASDSITQIPAVKGNFLFNGSVISGPGFTGGDLVRLNSSGNNIQNRGYIEVPIHFPSTSTRYRVRVRYASVTPIHLNVNWGNSSIFSNTVPATATSLDNLQSSDFGYFESANAFTSSLGNIVGVRNFSGTAGVIIDRFEFIPVTATLEAEYNLERAQKAVNALFTSTNQLGLKTNVTDYHIDQVSNLVTYLSDEFCLDEKRELSEKVKHAKRLSDERNLLQDSNFKDINRQPERGWGGSTGITIQGGDDVFKENYVTLSGTFDECYPTYLYQKIDESKLKAFTRYQLRGYIEDSQDLEIYLIRYNAKHETVNVPGTGSLWPLSAQSPIGKCGEPNRCAPHLEWNPDLDCSCRDGEKCAHHSHHFSLDIDVGCTDLNEDLGVWVIFKIKTQDGHARLGNLEFLEEKPLVGEALARVKRAEKKWRDKREKLEWETNIVYKEAKESVDALFVNSQYDQLQADTNIAMIHAADKRVHSIREAYLPELSVIPGVNAAIFEELEGRIFTAFSLYDARNVIKNGDFNNGLSCWNVKGHVDVEEQNNQRSVLVVPEWEAEVSQEVRVCPGRGYILRVTAYKEGYGEGCVTIHEIENNTDELKFSNCVEEEIYPNNTVTCNDYTVNQEEYGGAYTSRNRGYNEAPSVPADYASVYEEKSYTDGRRENPCEFNRGYRDYTPLPVGYVTKELEYFPETDKVWIEIGETEGTFIVDSVELLLMEE

SEQ ID NO: 102 - protein, 1177 aa, Bacillus thuringiensis SK-729
MDNNPNINECIPYNCLSNPEVEVLGGERIETGYTPIDISLSLTQFLLSEFVPGAGFVLGLVDIIWGIFGPSQWDAFLVQIEQLINQRIEEFARNQAISRLEGLSNLYQIYAESFREWEADPTNPALREEMRIQFNDMNSALTTAIPLLAVQNYQVPLLSVYVQAANLHLSVLRDVSVFGQRWGFDAATINSRYNDLTRLIGNYTDHAVRWYNTGLERVWGPDSRDWVRYNQFRRELTLTVLDIVALFPNYDSRRYPIRTVSQLTREIYTNPVLENFDGSFRGSAQGIERSIRSPHLMDILNSITIYTDAHRGYYYWSGHQIMASPVGFSGPEFTFPLYGTMGNAAPQQRIVAQLGQGVYRTLSSTFYRRPFNIGINNQQLSVLDGTEFAYGTSSNLPSAVYRKSGTVDSLDEIPPQNNNVPPRQGFSHRLSHVSMFRSGSSSSVSIIRAPMFSWIHRSAEFNNIIASDSITQIPAVKGNFLFNGSVISGPGFTGGDLVRLNSSGNNIQNRGYIEVPIHFPSTSTRYRVRVRYASVTPIHLYVNWGNSSIFSNTVPATATSLDNLQSSDFGYFESANAFTSSLGNIVGVRNFSGTAGVIIDRFEFIPVTATLEAEYNLERAQKAVNALFTSTNQLGLKTNVTDYHIDQVSNLVTCLSDEFCLDEKRELSEKVKHAKRLSDERNLLQDSNFKDINRQPERGWGGSTGITIQGGDDVFKENYVTLSGTFDECYPTYLYQKIDESKLKAFTRYQLRGYIEDSQDLEIYLIRYNAKHETVNVPGTGSLWPLSAQSPIGKCGEPNRFAPHLEWNPDLDCSCRDGEKCAHHSHHFSLDIDVGCTDLNEDLGVWVIFKIKTQDGHARLGNLEFLEEKPLVGEALARVKRAEKKWRDKREKLEWETNIVYKEAKESVDALFVNSQYDQLQADTNIAMIHAADKRVHSIREAYLPELSVIPGVNAAIFEELEGRIFTAFSLYDARNVIKNGDFNNGLSCWNVKGHVDVEEQNNQRSVLVVPEWEAEVSQEVRVCPGRGYILRVTAYKEGYGEGCVTIHEIENNTDELKFSNCVEEEIYPNNTVTCNDYTVNQEEYGGAYTSRNRGYNEAPSVPADYASVYEEKSYTDGRRENPCEFNRGYRDYTPLPVGYVTKELEYFPETDKVWIEIGETEGTFIVDSVESLLMEE

SEQ ID NO: 103 - protein, 1178 aa, Bacillus thuringiensis C-33
MDNNPNINECIPYNCLSNPEVEVLGGERIETGYTPIDISLSLTQFLLSEFVPGAGFVLGLVDIIWGIFGPSQWDAFLVQIEQLINQRIEEFARNQAISRLEGLSNLYQIYAESFREWEADPTNPALREEMRIQFNDMNSALTTAIPLFAVQNYQVLLLSVYVQAANLHLSVLRDVSVFGQRWGFDAATINSRYNDLTRLIGNYTDYAVRWYNTGLERVWGPDSRDWVRYNQFRRELTLTVLDIVALFPNYDSRRYPIRTVSQLTREIYTNPVLENFDGSFRGSAQGIERSIRSPHLMDILNSITIYTDAHRGYYYWSGHQIMASPVGFSGPEFTFPLYGTMGNAAPQQRIVAQLGQGVYRTLSSTLYRRPFNIGINNQQLSVLDGTEFAYGTSSNLPSAVYRKSGTVDSLDEIPPQNNNVPPRQGFSHRLSHVSMFRSGFSNSSVSIIRAPMFSWIHRSAEFNNIIASDSITQIPAVKGNFLFNGSVISGPGFTGGDLVRLNSSGNNIQNRGYIEVPIHFPSTSTRYRVRVRYASVTPIHLNVNWGNSSIFSNTVPATATSLDNLQSSDFGYFESANAFTSSLGNIVGVRNFSGTAGVIIDRFEFIPVTATLEAEYNLERAQKAVNALFTSTNQLGLKTNVTDYHIDQVSNLVTYLSDEFCLDEKRELSEKVKHAKRLSDERNLLQDSNFKDINRQPERGWGGSTGITIQGGDDVFKENYVTLSGTFDECYPTYLYQKIDESKLKAFTRYQLRGYIEDSQDLEIYLIRYNAKHETVNVPGTGSLWPLSAQSPIGKCGEPNRCAPHLEWNPDLDCSCRDGEKCAHHSHHFSLDIDVGCTDLNEDLGVWVIFKIKTQDGHARLGNLEFLEEKPLVGEALARVKRAEKKWRDKREKLEWETNIVYKEAKESVDALFVNSQYDQLQADTNIAMIHAADKRVHSIREAYLPELSVIPGVNAAIFEELEGRIFTAFSLYDARNVIKNGDFNNGLSCWNVKGHVDVEEQNNQRSVLVVPEWEAEVSQEVRVCPGRGYILRVTAYKEGYGEGCVTIHEIENNTDELKFSNCVEEEIYPNNTVTCNDYTVNQEEYGGAYTSRNRGYNEAPSVPVDYASVYEEKSYTDGRRENPCEFNRGYRDYTPLPVGYVTKELEYFPETDKVWIEIGETEGTFIVDSVELLLMEE

SEQ ID NO: 104 - protein, 1177 aa, Bacillus thuringiensis kenyae
MDNNPNINECIPYNCLSNPEVEVLGGERIETGYTPIDISLSLTQFLLSEFVPGAGFVLGLVDIIWGIFGPSQWDAFLVQIEQLINQRIEEFARNQAISRLEGLSNLYQIYAESFREWEADPTNPALREEMRIQFNDMNSALTTAIPLLAVQNYQVPLLSVYVQAANLHLSVLRDVSVFGQRWGFDAATINSRYNDLTRLIGNYTDHAVRWYNTGLERVWGPDSRDWVRYNQFRRELTLTVLDIVALFPNYDSRRYPIRTVSQLTREIYTNPVLENFDGSFRGSAQGIERSIRSPHLMDILNSITIYTDAHRGYYYWSGHQIMASPVGFSGPEFTFPLYGTMGNAAPQQRIVAQLGQGVYRTLSSTFYRRPFNIGINNQQLSVLDGTEFAYGTSSNLPSAVYRKSGTVDSLDEIPPQNNNVPPRQGFSHRLSHVSMFRSGSSSSVSIIRAPMFSWIHRSAEFNNIIASDSITQIPAVKGNFLFNGSVISGPGFTGGDLVRLNSSGNNIQNRGYIEVPIHFPSTSTRYRVRVRYASVTPIHLNVNWGNSSIFSNTVPATATSLDNLQSSDFGYFESANAFTSSLGNIVGVRNFSGTAGVIIDRFEFIPVTATLEAEYNLERAQKAVNALFTSTNQLGLKTNVTDYHIDQVSNLVTCLSDEFCLDEKRELSEKVKHAKRLSDERNLLQDSNFKDINRQPERGWGGSTGITIQGGDDVFKENYVTLSGTFDECYPTYLYQKIDESKLKAFTRYQLRGYIEDSQDLEIYLIRYNAKHETVNVPGTGSLWPLSAQSPIGKCGEPNRFAPHLEWNPDLDCSCRDGEKCAHHSHHFSLDIDVGCTDLNEDLGVWVIFKIKTQDGHARLGNLEFLEEKPLVGEALARVKRAEKKWRDKREKLEWETNIVYKEAKESVDALFVNSQYDQLQADTNIAMIHAADKRVHSIREAYLPELSVIPGVNAAIFEELEGRIFTAFSLYDARNVIKNGDFNNGLSCWNVKGHVDVEEQNNQRSVLVVPEWEAEVSQEVRVCPGRGYILRVTAYKEGYGEGCVTIHEIENNTDELKFSNCVEEEIYPNNTVTCNDYTVNQEEYGGAYTSRNRGYNEAPSVPADYASVYEEKSYTDGRRENPCEFNRGYRDYTPLPVGYVTKELEYFPETDKVWIEIGETEGTFIVDSVELLLMEE

SEQ ID NO: 105 - protein, 1177 aa, Bacillus thuringiensis
MDNNPNTNECIPYNCLSNPEVEVLGGERIETGYTPIDISLSLTQFLLSEFVPGAGFVLGLVDIIWGIFGPSQWDAFLVQIEQLINQRIEEFARNQAISRLEGLSNLYQIYAESFREWEADPTNPALREEMRIQFNDMNSALTTAIPLLAVQNYQVPLLSVYVQAANLHLSVLRDVSVFGQRWGFDAATINSRYNDLTRLIGNYTDYAVRWYNTGLERVWGPDSRDWVRYNQFRRELTLTVLDIVALFPNYDSRRYPIRTVSQLTREIYTNPVLENFDGSFRGSAQGIERSIRSPHLMDILNSITIYTDAHRGYYYWSGHQIMASPVGFSGPEFTFPLYGTMGNAAPQQRIVAQLGQGVYRTLSSTFYRRPFNIGINNQQLSVLDGTEFAYGTSSNLPSAVYRKSGTVDSLDEIPPQNNNVPPRQGFSHRLSHVSMFRSGSSSSVSIIRAPMFSWIHRSAEFNNIIASDSITQIPAVKGNFLFNGSVISGPGFTGGDLVRLNSSGNNIQNRGYIEVPIHFPSTSTRYRVRVRYASVTPIHLNVNWGNSSIFSNTVPATATSLDNLQSSDFGYFESANAFTSSLGNIVGVRNFSGTAGVIIDRFEFIPVTATLEAEYNLERAQKAVNALFTSTNQLGLKTNVTDYHIDQVSNLVTYLSDEFCLDEKRELSEKVKHAKRLSDERNLLQDSNFKDINRQPERGWGGSTGITIQGGDDVFKENYVTLSGTFDECYPTYLYQKIDESKLKAFTRYQLRGYIEDSQDLEIYLIRYNAKHETVNVPGTGSLWPLSAQSPIGKCGEPNRCAPHLEWNPDLDCSCRDGEKCAHHSHHFSLDIDVGCTDLNEDLGVWVIFKIKTQDGHARLGNLEFLEEKPLVGEALARVKRAEKKWRDKREKLEWETNIVYKEAKESVDALFVNSQYDQLQADTNIAMIHAADKRVHSIREAYLPELSVIPGVNAAIFEELEGRIFTAFSLYDARNVIKNGDFNNGLSCWNVKGHVDVEEQNNQRSVLVVPEWEAEVSQEVRVCPGRGYILRVTAYKEGYGEGCVTIHEIENNTDELKFSNCVEEEIYPNNTVTCNDYTVNQEEYGGAYTSRNRGYNEAPSVPADYASVYEEKSYTDGRRENPCEFNRGYRDYTPLPVGYVTKELEYFPETDKVWIEIGETEGTFIVDSVELLLMEE

SEQ ID NO: 106 - protein, 1164 aa, Bacillus thuringiensis INTA Mol-12
NECIPYNCLSNPEVEVLGGERIETGYTPIDISLSLTQFLLSEFVPGAGFVLGLVDIIWGIFGPSQWDAFLVQIEQLINQRIEEFARNQAISRLEGLSNLYQIYAESFREWEADPTNPALREEMRIQFNDMNSALTTAIPLLAVQNYQVPLLSVYVQAANLHLSVLRDVSVFGQRWGFDAATINSRYNDLTRLIGNYTDYAVRWYNTGLERVWGPDSRDWVRYNQFRRELTLTVLDIVALFPNYDSRRYPIRTVSQLTREIYTNPVLENFDGSFRGSAQGIERSIRSPHLMDILNSITIYTDAHRGYYYWSGHQIMASPVGFSGPEFTFPLYGTMGNAAPQQRIVAQLGQGVYRTLSSTFYRRPFNIGINNQQLSVLDGTEFAYGTSSNLPSAVYRKSGTVDSLDEIPPQNNNVPPRQGFSHRLSHVSMFRSGSSSSVSIIRAPMFSWIHRSAEFNNIIASDSITQIPAVKGNFLFNGSVISGPGFTGGDLVRLNSSGNNIQNRGYIEVPIHFPSTSTRYRVRVRYASVTPIHLNVNWGNSSIFSNTVPATATSLDNLQSSDFGYFESANAFTSSLGNIVGVRNFSGTAGVIIDRFEFIPVTATLEAEYNLERAQKAVNALFTSTNQLGLKTNVTDYHIDQVSNLVTYLSDEFCLDEKRELSEKVKHAKRLSDERNLLQDSNFKDINRQPERGWGGSTGITIQGGDDVFKENYVTLSGTFDECYPTYLYQKIDESKLKAFTRYQLRGYIEDSQDLEIYLIRYNAKHETVNVPGTGSLWPLSAQSPIGKCGEPNRCAPHLEWNPDLDCSCRDGEKCAHHSHHFSLDIDVGCTDLNEDLGVWVIFKIKTQDGHARLGNLEFLEEKPLVGEALARVKRAEKKWRDKREKLEWETNIVYKEAKESVDALFVNSQYDQLQADTNIAMIHAADKRVHSIREAYLPELSVIPGVNAAIFEELEGRIFTAFSLYDARNVIKNGDFNNGLSCWNVKGHVDVEEQNNQRSVLVVPEWEAEVSQEVRVCPGRGYILRVTAYKEGYGEGCVTIHEIENNTDELKFSNCVEEEIYPNNTVTCNDYTVNQEEYGGAYTSRNRGYNEAPSVPADYASVYEEKSYTDGRRENPCEFNRGYRDYTPLPVGYVTKELEYFPETDKVWIEIGETEGTFIVDSVE

SEQ ID NO: 107 - protein, 1178 aa, Bacillus thuringiensis W015-1
MDNNPNINECIPYNCLSNPEVEVLGGERIETGYTPIDISLSLTQFLLSEFVPGAGFVLGLVDIIWGIFGPSQWDAFLVQIEQLINQRIEEFARNQAISRLEGLSNLYQIYAESFREWEADPTNPALREEMRIQFNDMNSALTTAIPLFAVQNYQVPLLSVYVQAANLHLSVLRDVSVFGQRWGFDAATINSRYNDLTRLIGNYTDYAVRWYNTGLERVWGPDSRDWVRYNQFTRELTLTVLDIVALFPNYDSRRYPIRTVSQLTREIYTNPVLENFDGSFRGSAQGIERSIRSPHLMDILNSITIYTDAHRGYYYWSGHQIMASPVGFSGPEFTFPLYGTMGNAAPQQRIVAQLGQGVYRTLSSTLYRRPFNIGINNQQLSVLDGTEFAYGTSSNLPSAVYRKSGTVDSLDEIPPQNNNVPPRQGFSHRLSHVSMFRSGFSNSSVSIMRAPMFSWIHRSAEFNNIIASDSITQIPAVKGNFLFNGSVISGPGFTGGDLVRLNSSGNNIQNRGYIEVPIHFPSTSTRYRVRVRYASVTPIHLNVNWGNSSIFSNTVPATATSLDNLQSSDFGYFESANAFTSSLGNIVGVRNFSGTAGVIIDRFEFIPVTATLEAEYNLERAQKAVNALFTSTNQLGLKTNVTDYHIDQVSNLVTYLSDEFCLDEKRELSEKVKHAKRLSDERNLLQDSNFKDINRQPERGWGGSTGITIQGGDDVFKENYVTLSGTFDECYPTYLYQKIDESKLKAFTRYQLRGYIEDSQDLEIYLIRYNAKHETVNVPGTGSLWPLSAQSPIGKCGEPNRCAPHLEWNPDLDCSCRDGEKCAHHSHHFSLDIDVGCTDLNEDLGVWVIFKIKTQDGHARLGNLEFLEEKPLVGEALARVKRAEKKWRDKREKLEWETNIVYKEAKESVDALFVNSQYDQLQADTNIAMIHAADKRVHSIREAYLPELSVIPGVNAAIFEELEGRIFTAFSLYDARNVIKNGDFNNGLSCWNVKGHVDVEEQNNQRSVLVVPEWEAEVSQEVRVCPGRGYILRVTAYKEGYGEGCVTIHEIENNTDELKFSNCVEEEIYPNNTVTCNDYTVNQEEYGGAYTSRNRGYNEAPSVPADYASVYEEKSYTDGRRENPCEFNRGYRDYTPLPVGYVTKELEYFPETDKVWIKIGETEGTFIVDSVELLLMEE

SEQ ID NO: 108 - protein, 960 aa, Bacillus thuringiensis serovar kurstaki
  misc_feature (560)..(560): Xaa can be any naturally occurring amino acid
MDNNPNTNECIPYNCLSNPEVEVLGGERIETGYTPIDISLSLTQFLLSEFVPGAGFVLGLVDIIWGIFGPSQWDDAFLVQIEQLINQRIEEFARNPAISRLEGGLSNLYQIYAESFREWEADPTNPALREEMRIQFNDMNSALTTAIPLLAVQNYQVPLLSVYVQAANLHYSVLRDVSVFGQRWGFDAAATINSRYNDLTSPIGNYTDYAVRWYNTGLERVWGPDSRDWVRYNQFRRELTLTVLDIVALLFPNYDSRRRRYPIRTVSQLTREIYTNPVLENFDGSSFRGSAQGIERSSIRSPHLMDILNSITIYTDAHRGYYYCSGHQIMASPVGFSGPEFTFPLYGTMGNAAPQQRMVAQLGQGVYRTLSSSTYYRRPFNIGINNQQLSVLDGTEFAYGTSSNLPSAVYRKSGTVDSLDEIPPQNNNVPPRQGFSHRLSHVSMFRSGFSNSSVSIISAPMFSWIHRSAEFNNTIASDSITQIPAAVKGNFLFNGSVISGPGFTGGDLVRLNSSGNNIQNRGYIEVPIHFPSTSTRYRVRVRYASVTPIHLNVNWGNSSXSIFSNTVPATATSLDNLQSSDFGYFESANAFTSSLGNIVGVRNFSGTAGVIIDRFEFIPVTATLEAEYNLERAQKAVNALFTSTNQLGLKTNVTDYHIDQVSNLVTYLSDEFCLDEKRELSEKVKHAKRLSDERNLLQDSNFKDINRQPERGWGGSTGITIIQGGDDVFKENYVTLSGTFDECYPTYLYQKIDESKLKAFTRYQLRGYIEDSQDLEIYLIRYNAKHETVNRYGTGSLWPLSAQSPIGKCGEPNRCAPHLEWNPDLDCSCRDGEKCAHHSHHFSLDIDVGCTDLNEDLGVWVIFKIKTQDGHARLGNLEFLEEKPLVGEALARVKRAEKKWRDKREKLEWETNIVYKEAKESVDALFVNSQYDQLQADTNIAMIHAAADDNRVHSIREAYL

SEQ ID NO: 109 - protein, 1177 aa, Bacillus thuringiensis 146-158-01
MDNNPNINECNPYNCLSNPEVEVLGGERIETGYTPIDISLSLTQFLLSEFVPGAGFVLGLVDIIWGIFGPSQWDAFLVQIEQLINQRIEEFARNQAISRLEGLSNLYQIYAESFREWEADPTNPALREEMRIQFNDMNSALTTAIPLLAVQNYQVPLLSVYVQAANLHLSVLRDVSVFGQRWGFDAATINSRYNDLTRLIGNYTDYAVRWYNTGLERVWGPDSRDWVRYNQFRRELTLTVLDIVALFSNYDSRRYPIRTVSQLTREIYTNPVLENFDGSFRGSAQGIERSIRSPHLMDILNSITIYTDAHRGYYYWSGHQIMASPVGFSGPEFTFPLYGTMGNAAPQQRIVAQLGQGVYRTLSSTFYRRPFNIGINNQQLSVLDGTEFAYGTSSNLPSAVYRKSGTVDSLDEIPPQNNNVPPRQGFSHRLSHVSMFRSGSSSSVSIIRAPMFSWIHRSAEFNNIIASDSITQIPAVKGNFLFNGSVISGPGFTGGDLVRLNSSGNNFQNRGYIEVPIHFPSTSTRYRVRVRYASVTPIHLNVNWGNSSIFSNTVPATATSLDNLQSSDFGYFESANAFTSSLGNIVGVRNFSGTAGVIIDRFEFIPVTATLEAEYNLERAQKAVNALFTSTNQLGLKTNVTDYHIDQVSNLVTYLSDEFCLDEKRELSEKVKHAKRLSDERNLLQDSNFKDINRQPERGWGGSTGITIQGGDDVFKENYVTLSGTFDECYPTYLYQKIDESKLKAFTRYQLRGYIEDSQDLEIYLIRYNAKHETVNVPGTGSLWPLSAQSPIGKCGEPNRCAPHLEWNPDLDCSCRDGEKCAHHSHHFSLDIDVGCTDLNEDLGVWVIFKIKTQDGHARLGNLEFLEEKPLVGEALARVKRAEKKWRDKREKLEWETNIVYKEAKESVDALFVNSQYDQLQADTNIAMIHAADKRVHSIREAYLPELSVIPGVNAAIFEELEGRIFTAFSLYDARNVIKNGDFNNGLSCWNVKGHVDVEEQNNQRSVLVVPEWEAEVSQEVRVCPGRGYILRVTAYKEGYGEGCVTIHEIENNTDELKFSNCVEEEIYPNNTVTCNDYTVNQEEYGGAYTSRNRGYNEAPSVPADYASVYEEKSYTDGRRENPCEFNRGYRDYTPLPVGYVTKELEYFPETDKVWIEIGETEGTFIVDSVELLLMEE

SEQ ID NO: 110 - protein, 1177 aa, Bacillus thuringiensis Tm37-6
MDNNPNINECIPYNCLSNPEVEVLGGERIETGYTPIDISLSLTQFLLSEFVPGAGFVLGLVDIIWGIFGPSQWDAFLVQIEQLINQRIEEFARNQAISRLEGLSNLYQIYAESFREWEADPTNPALREEMRIQFNDMNSALTTAIPLLAVQNYQVPLLSVYVQAANLHLSVLRDVSVFGQRWGFDAATINSRYNDLTRLIGNYTDYAVRWYNTGLERVWGPDSRDWVRYSQFRRELTLTVLDIVALFPNYDSRRYPIRTVSQLTREIYTNPVLENFDGSFRGSAQGIERSIRSPHLMDILNSITIYTDAHRGYYYWSGHQIMASPVGFSGPEFTFPLYGTMGNAAPQQRIVAQLGQGVYRTLSSTFYRRPFNIGINNQQLSVLDGTEFAYGTSSNLPSAVYRKSGTVDSLDEIPPQNNNVPPRQGFSHRLSHVSMFRSGSSSSVSIIRAPTFSWIHRSAEFNNIIASDSITQIPAVKGNFLFNGSVISGPGFTGGDLVRLNSSGNNIQNRGYIEVPIHFPSTSTRYRVRVRYASVTPIHLNVNWGNSSIFSNTVPATATSLDNLQSSDFGYFESANAFTSSLGNIVGVRNFSGTAGVIIDRFEFIPVTATLEAEYNLERAQKAVNALFTSTNQLGLKTNVTDYHIDQVSNLVTYLSDEFCLDEKRELSEKVKHAKRLSDERNLLQDSNFKDINRQPERGWGGSTGITIQGGDDVFKENYVTLSGTFDECYPTYLHQKIDESKLKAFTRHQLRGYIEDSQDLEIYLIRYNAKHETVNVPGTGSLWPLSAQSPIGKCGEPNRCAPHLEWNPDLDCSCRDGEKCAHHSHHFSLDIDVGCTDLNEDLGVWVIFKIKTQDGHARLGNLEFLEEKPLVGEALARVKRAEKKWRDKREKLEWETNIVYKEAKESVDALFVNSQYDQLQADTNIAMIHAADKRVHSIREAYLPELSVIPGVNAAIFEELEGRIFTAFSLYDARNVIKNGDFNNGLSCWNVKGHVDVEEQNNQRSVLVVPEWEAEVSQEVRVCPGRGYILRVTAYKEGYGEGCVTIHEIENNTDELKFSNCVEEEIYPNNTVTCNDYTVNQEEYGGAYTSRNRGYNEAPSVPADYASVYEEKSYTDGRRENPCEFNRGYRDYTPLPVGYVTKELEYFPETDKVWIEIGETEGTFIVDSVELLLMEE

SEQ ID NO: 111 - protein, 1177 aa, Bacillus thuringiensis Tm41-4
MDNNPNINECIPYNCLSNPEVEVLGGERIETGYTPIDISLSLTQFLLSEFVPGAGFVLGLVDIIWGIFGPSQWDAFLVQIEQLINQRIEEFARNQAISRLEGLSNLYQIYAESFREWEADPTNPALREEMRIQFNDMNSALTTAIPLLAVQNYQVPLLSVYVQAANLHLSVLRDVSVFGQRWGFDAATINSRYNDLTRLIGNYTDYAVRWYNTGLERVWGPDSRDWVRYNQFRRELTLTVLDIVALFPNYDSRRYPIRTVSQLTREIYTNPVLENFDGSFRGSAQGIERSIRSPHLMDILNSITIYTDAHRGYYYWSGHQIMASPVGFSGPEFTFPLYGTMGNAAPQQRIVAQLGQGVYRTLSSTFYRRPFNIGINNQQLSVLDGTEFAYGTSSNLPSAVYRKSGTVDSLDEIPPQNNNVPPRQGFSHRLSHVSMFRSGSSSSVSIIRAPMFSWIHRSAEFNNIIASDSITQIPAVKGNFLFNGSVISGPGFTGGDLVRLNSSGNNIQNRGYIEVPIHFPSTSTRYRVRVRYASVTPIHLNVNWGNSSIFSNTVPATATSLDNLQSSDFGYFESANAFTSSLGNIVGVRNFSGTAGVIIDRFEFIPVTATLEAEYNLERAQKAVNALFTSTNQLGLKTNVTDYHIDQVSNLVTYLSDEFCLDEKRELSEKVKHAKRLSDERNLLQDSNFKDINRQPERGWGGSTGITIQGGDDVFKENYVTLSGTFDECYPTYLYQKIDESKLKAFTRYQLRGYIEDSQDLEIYLIRYNAKHETVNVPGTGSLWPLSAQSPIGKCGEPNRCAPHLEWNPDLDCSCRDGEKCAHHSHHFSLDIDVGCTDLNEDLGVWVIFKIKTQDGHARLGNLEFLEEKPLVGEALARVKRAEKKWRDKREKLEWETNIVYKEAKESVDALFVNSQYDQLQADTNIAMIHAADKRVHSIREAYLPELSVIPGVNAAIFEELEGRIFTAFSLYDARNVIKNGDFNNGLSCWNVKGHVDVEEQNNQRSVLVVPEWEAEVSQEVRVCPGRGYILRVTAYKEGYGEGCVTIHEIENNTDELKFSNCVEEEIYPNNTVTCNDYTVNQEEYGGAYTSRNRGYNEAPSVPADYASVYEEKSYTDGRRENPCEFNRGYRDYTPLPVGYVTKELEYFPETDKVWIEIGETEGTFIVDSYSVPLGGG

SEQ ID NO: 112 - protein, 1177 aa, Bacillus thuringiensis Tm44-1B
MDNNPNINECIPYNCLSNPEVEVLGGERIETGYTPIDISLSLTQFLLSEFVPGAGFVLGLVDIIWGIFGPSQWDAFLVQIEQLINQRIEEFARNQAISRLEGLSNLYQIYAESFREWEADPTNPALREEMRIQFNDMNSALTTAIPLLAVQNYQVPLLSVYVQAANLHLSVLRDVSVFGQRWGFDAATINSRYNDLTRLIGNYTDYAVRWYNTGLERVWGPDSRDWVRYNQFRRELTLTVLDIVALFPNYDSRRYPIRTVSQLTREIYTNPVLENFDGSFRGSAQGIERSIRSPHLMDILNSITIYTDAHRGYYYWSGHQIMASPVGFSGPEFTFPLYGTMGNAASQQRIVAQLGQGVYRTLSSTFYRRPFNIGINNQQLSVLDGTEFAYGTSSNLPSAVYRKSGTVDSLDEIPPQNNNVPPRQGFSHRLSHVSMFRSGSSSSVSIIRAPMFSWIHRSAEFNNIIASDSITQIPAVKGNFLFNGSVISGPGFTGGDLVRLNSSGNNIQNRGYIEVPIHFPSTSTRYRVRVRYASVTPIHLNVNWGNSSIFSNTVPATATSLDNLQSSDFGYFESANAFTSSLGNIVGVRNFSGTAGVIIDRFEFIPVTATLEAEYNLERAQKAVNALFTSTNQLGLKTNVTDYHIDQVSNLVTYLSDEFCLDEKRELSEKVKHAKRLSDERNLLQDSNFKDINRQPERGWGGSTGITIQGGDDVFKENYVTLSGTFDECYPTYLYQKIDESKLKAFTRYQLRGYIEDSQDLEIYLIRYNAKHETVNVPGTGSLWPLSAQSPIGKCGEPNRCAPHLEWNPDLDCSCRDGEKCAHHSHHFSLDIDVGCTDLNEDLGVWVIFKIKTQDGHARLGNLEFLEEKPLVGEALARVKRAEKKWRDKREKLEWETNIVYKEAKESVDALFVNSQYDQLQADTNIAMIHAADKRVHSIREAYLPELSVIPGVNAAIFEELEGRIFTAFSLYDARNVIKNGDFNNGLSCWNVKGHVDVEEQNNQRSVLVVPEWEAEVSQEVRVCPGRGYILRVTAYKEGYGEGCVTIHEIENNTDELKFSNCVEEEIYPNNTVTCNDYTVNQEEYGGAYTSRNRGYNEAPSVPADYASVYEEKSYTDGRRENPCEFNRGYRDYTPLPVGYVTKELEYFPETDKVWIEIGETEGTFIVDSVQYPVTEE

SEQ ID NO: 113 - protein, 1178 aa, Bacillus thuringiensis Q-12
MDNNPNINECIPYNCLSNPEVEVLGGERIETGYTPIDISLSLTQFLLSEFVPGAGFVLGLVDIIWGIFGPSQWDAFLVQIEQLINQRIEEFARNQAISRLEGLSNLYQIYAESFREWEADPTNPALREEMRIQFNDMNSALTTAIPLFAVQNYQVPLLSVYVQAANLHLSVLRDVSVFGQRWGFDAATINSRYNDLTRLIGNYTDYAVRWYNTGLERVWGPDSRDWVRYNQFRRELTLTVLDIVALFPNYDSRRYPIRTVSQLTREIYTNPVLENFDGSFRGSAQGIERSIRSPHLMDILNSITIYTDAHRGYYYWSGHQVMASPVGFSGPEFTFPLYGTMGNAAPQQRIVAQLGQGVYRTLSSTLYRRPFNIGINNQQLSVLDGTEFAYGTSSNLPSAVYRKSGTVDSLDEIPPQNNNVPPRQGFSHRLSHVSMFRSGFSNSSVSIIRAPMLSWIHRSAEFNNIIASDSITQIPAVKGNFLFNGSVISGPGFTGGDLVRLNSSGNNIQNRGYIEVPIHFPSTSTRYRVRVRYASVTPIHLNVNWGNSSIFSNTVPATATSLDNLQSSDFGYFESANAFTSSLGNIVGVRNFSGTAGVIIDRFEFIPVTATLEAEYNLERAQKAVNALFTSTNQLGLKTNVTDYHIDQVSNLVTYLSDEFCLDEKRELSEKVKHAKRLSDERNLLQDSNFKDINRQPERGWGGSTGITIQGGDDVFKENYVTLSSTFDECYPTYLYQKIDESKLKAFTRYRLRGYIEDSQDLEIYLIRYNAKHETVNVPGTGSLWPLSAQSPIGKCGEPNRCAPHLEWNPDLDCSCRDGEKCAHHSHHFSLDIDVGCTDLNEDLGVWVIFKIKTQDGHARLGNLEFLEEKPLVGEALARVKRAEKKWRDKREKLEWETNIVYKEAKESVDALFVNSQYDQLQADTNIAMIHAADKRVHSIREAYLPELSVIPGVNAAIFEELEGRIFTAFSLYDARNVIKNGDFNNGLSCWNVKGHVDVEEQNNQRSVLVVPEWEAEVSQEVRVCPGRGYILRVTAYKEGYGEGCVTIHEIENNTDELKFSNCVEEEIYPNNTVTCNDYTVNQEEYGGAYTSRNRGYNEAPSVPADYASVYEEKSYTDGRRENPCEFNRGYRDYTPLPVGYVTKELEYFPETDKVWIEIGETEGTFIVDSVELLLMEE

SEQ ID NO: 114 - protein, 1164 aa, Bacillus thuringiensis INTA TA24-6; identical to SEQ ID NO: 106

SEQ ID NO: 115 - protein, 618 aa, Bacillus thuringiensis BTS89A
MDNNPNINECIPYNCLSNPEVEVLGGERIETGYTPIDISLSLTQFLLSEFVPGAGFVLGLVDIIWGIFGPSQWDAFLVQIEQLINQRIEEFARNQAISRLEGLSNLYQIYAESFREWEADPTNPALREEMRIQFNDMNSALTTAIPLLAVQNYQVPLLSVYVQAANLHLSVLRDVSVFGQRWGFDAATINSRYNDLTRLIGNYTDYAVRWYNTGLERVWGPDSRDWVRYNQFRRELTLTVLDIVALFPNYDSRRYPIRTVSQLTREIYTNPVLENFDGSFRGSAQGIERSIRSPHLMDILNSITIYTDAHRGYYYWSGHQIMASPVGFSGPEFTFPLYGTMGNAAPQQRIVAQLGQGVYRTLSSTFYRRPFNIGINNQQLSVLDGTEFAYGTSSNLPSAVYRKSGTVDSLDEIPPQNNNVPPRQGFSHRLSHVSMFRSGSSSSVSIIRAPMFSWIHRSAEFNNIIASDSITQIPAVKGNFLFNGSVISGPGFTGGDLVRLNSSGNNIQNRGYIEVPIHFPSTSTRYRVRVRYASVTPIHLNVNWGNSSIFSNTVPATATSLDNLQSSDFGYFESANAFTSSLGNIVGVRNFSGTAGVIIDRFEFIPVTATLEAEYNLE

SEQ ID NO: 116 - protein, 1178 aa, Bacillus thuringiensis S1478-1
MDNNPNINECIPYNCLSNPEVEVLGGERIETGYTPIDISLSLTQFLLSEFVPGAGFVLGLVDIIWGIFGPSQWDAFLVQIEQLINQRIEEFARNQAISRLEGLSNLYQIYAESFREWEADPTNPALREEMRIQFNDMNSALTTAIPLFAVQNYQVPLLSVYVQAANLHLSVLRDVSVFGQRWGFDAATINSRYNDLTRLIGNYTDYAVRWYNTGLERVWGPDSRDWVRYNQFRRELTLTVLDIVALFPNYDSRRYPIRTVSQLTREIYTNPVLENFDGSFRGSAQGIERSIRSPHLMDILNSITIYTDAHRGYYYWSGHQIMASPVGFSGPEFTFPLYGTMGNAAPQQRIVAQLGQGVYRTLSSTLYRRPFNIGINNQQLSVLDGTEFAYGTSSNLPSAVYRKSGTVDSLDEIPPQNNNVPPRQGFSHRLSHVSMFRSGFSNSSVSIIRAPMFSWIHRSAEFNNIIASDSITQIPAVKGNFLFNGSVISGPGFTGGDLVRLNSSGNNIQNRGYIEVPIHFPSTSTRYRVRVRYASVTPIHLNVNWGNSSIFSNTVPATATSLDNLQSSDFGYFESANAFTSSLGNIVGVRNFSGTAGVIIDRFEFIRVTATLEAEYNLERAQKAVNALFTSTNQLGLKTNVTDYHIDQVSNLVTYLSDEFCLDEKRELSEKVKHAKRLSDERNLLQDSNFKDINRQPERGWGGSTGITIQGGDDVFKENYVTLSGTFDECYPTYLYQKIDESKLKAFTRYQLRGYIEDSQDLEIYLIRYNAKHETVNVPGTGSLWPLSAQSPIGKCGEPNRCAPHLEWNPDLDCSCRDGEKCAHHSHHFSLDIDVGCTDLNEDLGVWVIFKIKTQDGHARLGNLEFLEEKPLVGEALARVKRAEKKWRDKREKLEWETNIVYKEAKESVDALFVNSQYDQLQADTNIAMIHAADKRVHSIREAYLPELSVIPGVNAAIFEELEGRIFTAFSLYDARNVIKNGDFNNGLSCWNVKGHVDVEEQNNQRSVLVVPEWEAEVSQEVRVCPGRGYILRVTAYKEGYGEGCVTIHEIENNTDELKFSNCVEEEIYPNNTVTCNDYTVNQEEYGGAYTSRNRGYNEAPSVPADYASVYEEKSYTDGRRENPCEFNRGYRDYTPLPVGYVTKELEYFPETDKVWIEIGETEGTFIVDSVELLLMEE

SEQ ID NO: 117 - protein, 1178 aa, Bacillus thuringiensis S3299-1
MDNNPNINECIPYNCLSNPEVEVLGGERIETGYTPIDISLSLTQFLLSEFVPGAGFVLGLVDIIWGIFGPSQWDAFLVQIEQLINQRIEEFARNQAISRLEGLSNLYQIYAESFREWEADPTNPALREEMRIQFNDMNSALTTAIPLFAVQNYQVPLLSVYVQAANLHLSVLRDVSVFGQRWGFDAATINSRYNDLTRLIGNYTDYAVRWYNTGLERVWGPDSRDWVRYNQFRRELTLTVLDIVALFPNYDSRRYPIRTVSQLTREIYTNPVLENFDGSFRGSAQGIERSIRSPHLMDILNSITIYTDAHRGYYYWSGHQIMASPVGFSGPEFTFPLYGTMGNAAPQQRIVAQLGQGVYRTLSSTLYRRPFNIGINNQQLSVLDGTEFAYGTSSNLPSAVYRKSGTVDSLDEIPPQNNNVPPRQGFSHRLSHVSMFRSGFSNSSVSIIRAPMFSWIHRSAEFNNIIASDSITQIPAVKGNFLFNGSVISGPGFTGGDLVRLNSSGNNIQNRGYIEVPIHFPSTSTRYRVRVRYASVTPIHLNVNWGNSSIFSNTVPATATSLDNLQSSDFGYFESANAFTSSLGNIVGVRNFSGTAGVIIDRFEFIPVTATLEAEYNLERAQKAVNALFTSTNQLGLKTNVTDYHIDQVSNLVTYLSDEFCLDEKRELSEKVKHAKRLSDERNLLQDSNFKDINRQPERGWGGSTGITIQGGDDVFKENYVTLSGTFDECYPTYLYQKIDESKLKAFTRYQLRGYIEDSQDLEIYLIRYNAKHETVNVPGTGSLWPLSAQSPIGKCGEPNRCAPHLEWNPDLDCSCRDGEMCAHHSHHFSLDIDVGCTDLNEDLGVWVIFKIKTQDGHARLGNLEFLEEKPLVGEALARVKRAEKKWRDKRGKLEWETNIVYKEAKESVDALFVNSQYDQLQADTNIAMIHAADKRVHSIREAYLPELSVIPGVNAAIFEELEGRIFTAFSLYDARNVIKNGDFNNGLSCWNVKGHVDVEEQNNQRSVLVVPEWEAEVSQEVRVCPGRGYILRVTAYKEGYGEGCVTIHEIENNTDELKFSNCVEEEIYPNNTVTCNDYTVNQEEYGGAYTSRNRGYNEAPSVPADYASVYEEKSYTDGRRENPCEFNRGYRDYTPLPVGYVTKELEYFPETDKVWIEIGETGGTFIVDSVELLLMEE

SEQ ID NO: 118 - protein, 1177 aa, Bacillus thuringiensis ZQ-89
MDNNPNINECIPYNCLSNPEVEVLGGERIETGYTPIDISLSLTQFLLSEFVPGAGFVLGLVDIIWGIFGPSQWDAFLVQIEQLINQRIEEFARNQAISRLEGLSNLYQIYAESFREWEADPTNPALREEMRIQFNDMNSALTTAIPLLAVQNYQVPLLSVYVQAANLHLSVLRDVSVFGQRWGFDAATINSRYNDLTRLIGNYTDYAVRWYNTGLERVWGPDSRDWVRYNQFRRELTLTVLDIVALFPNYDSRRYPIRTVSQLTREIYTNPVLENFDGSFRGSAQGIERSIRSPHLMDILNSITIYTDAHRGYYYWSGHQIMASPVGFSGPEFTFPLYGTMGNAAPQQRIVAQLGQGVYRTLSSTFYRRPFNIGINNQQLSVLDGTEFAYGTSSNLPSAVYRKSGTVDSLDEIPPQNNNVPPRQGFSHRLSHVSMFRSGSSSSVSIIRAPMFSWIHRSAEFNNIIASDSITQIPAVKGNFLFNGSVISGPGFTGGDLVRLNSSGNNIQNRGYIEVPIHFPSTSTRYRVRVRYASVTPIHLNVNWGNSSIFSNTVPATATSLDNLQSSDFGYFESANAFTSSLGNIVGVRNFSGTAGVIIDRFEFIPVTATLEAEYNLERAQKAVNALFTSTNQLGLKTNVTDYHIDQVSNLVTYLSDEFCLDEKRELSEKVKHAKRLSDERNLLQDSNFKDINRQPERGWGGSTGITIQGGDDVFKENYVTLSGTFDECYPTYLYQKIDESKLKAFTRYQLRGYIEDSQDLEIYLIRYNAKHETVNVPGTGSLWPLSAQSPIGKCGEPNRCAPHLEWNPDLDCSCRDGEKCAHHSHHFSLDIDVGCTDLNEDLGVWVIFKIKTQDGHARLGNLEFLEEKPLVGEALARVKRAEKKWRDKREKLEWETNIVYKEAKESVDALFVNSQYDQLQADTNIAKIHAADKRVHSIREAYLPELSVIPGVNAAIFEELEGRIFTAFSLYDARNVIKNGDFNNGLSCWNVKGHVDVEEQNNQRSVLVVPEWEAEVSQEVRVCPGRGYILRVTAYKEGYGEGCVTIHEIENNTDELKFSNCVEEEIYPNNTVTCNDYTVNQEEYGGAYTSRNRGYNEAPSVPADYASVYEEKSYTDGRRENPCEFNRGYRDYTPLPVGYVTKELEYFPETDKVWIEIGETEGTFIVDSVELLLMEE

SEQ ID NO: 119 - protein, 1172 aa, Bacillus thuringiensis SK-711
MDNNPNINECIPYNCLSNPEVEVLGGERIETGYTPIDISLSLTQFLLSEFVPGAGFVLGLVDIIWGIFGPSQWDAFLVQIEQLINQRIEEFARNQAISRLEGLSNLYQIYAESFREWEADPTNPALREEMRIQFNDMNSALTTAIPLLAVQNYQVPLLSVYVQAANLHLSVLRDVSVFGQRWGFDAATINSRYNDLTRLIGNYTDHAVRWYNTGLERVWGPDSRDWVRYNQFRRELTLTVLDIVALFPNYDSRRYPIRTVSQLTREIYTNPVLENFDGSFRGSAQGIERSIRSPHLMDILNSITIYTDAHRGYYYWSGHQIMASPVGFSGPEFTFPLYGTMGNAAPQQRIVAQLGQGVYRTLSSTFYRRPFNIGINNQQLSVLDGTEFAYGTSSNLPSAVYRKSGTVDSLDEIPPQNNNVPPRQGFSHRLSHVSMFRSGSSSSVSIIRAPMFSWIHRSAEFNNIIAPDSITQIPAVKGNFLFNGSVISGPGFTGGDLVRLNSSGNNIQNRGYIEVPIHFPSTSTRYRVRVRYASVTPIHLYVNWGNSSIFSNTVPATATSLDNLQSSDFGYFESANAFTSSLGNIVGVRNFSGTAGVIIDRFEFIPVTATLEAEYNLERAQKAVNALFTSTNQLGLKTNVTDYHIDQVSNLVTCLSDEFCLDEKRELSEKVKHAKRLSDERNLLQDSNFKDINRQPERGWGGSTGITIQGGDDVFKENYVTLSGTFDECYPTYLYQKIDESKLKAFTRYQLRGYIEDSQDLEIYLIRYNAKHETVNVPGTGSLWPLSAQSPIGKCGEPNRFAPHLEWNPDLDCSCRDGEKCAHHSHHFSLDIDVGCTDLNEDLGVWVIFKIKTQDGHARLGNLEFLEEKPLVGEALARVKRAEKKWRDKREKLEWETNIVYKEAKESVDALFVNSQYDQLQADTNIAMIHAADKRVHSIREAYLPELSVIPGVNAAIFEELEGRIFTAFSLYDARNVIKNGDFNNGLSCWNVKGHVDVEEQNNQRSVLVVPEWEAEVSQEVRVCPGRGYILRVTAYKEGYGEGCVTIHEIENNTDELKFSNCVEEEIYPNNTVTCNDYTVNQEEYGGAYTSRNRGYNEAPSVPADYASVYEEKSYTDGRRENPCEFNRGYRDYTPLPVGYVTKELEYFPETDKVWIEIGETEGTFIVDSVEL

SEQ ID NO: 120 - protein, 608 aa, Bacillus thuringiensis SK-783
MDNNPNINECIPYNCLSNPEVEVLGGERIETGYTPIDISLSLTQFLLSEFVPGAGFVLGLVDIIWGIFGPSQWDAFLVQIEQLINQRIEEFARNQAISRLEGLSNLYQIYAESFREWEADPTNPALREEMRIQFNDMNSALTTAIPLLAVQNYQVPLLSVYVQAANLHLSVLRDVSVFGQRWGFDAATINSRYNDLTRLIGNYTDHAVRWYNTGLERVWGPDSRDWVRYNQFRRELTLTVLDIVALFPNYDSRRYPIRTVSQLTREIYTNPVLENFDGSFRGSAQGIERSIRSPHLMDILNSITIYTDAHRGYYYWSGHQIMASPVGFSGPEFTFPLYGTMGNAAPQQRIVAQLGQGVYRTLSSTFYRRPFNIGINNQQLSVLDGTEFAYGTSSNLPSAVYRKSGTVDSLDEIPPQNNNVPPRQGFSHRLSHVSMFRSGSSSSVSIIRAPMFSWIHRSAEFNNIIASDSITQIPAVKGNFLFNGSVISGPGFTGGDLVRLNSSGNNIQNRGYIEVPIHFPSTSTRYRVRVRYASVTPIHLYVNWGNSSIFSNTVPATATSLDNLQSSDFGYFESANAFTSSLGNIVGVRNFSGTAGVIIDRFEFIPVT

SEQ ID NO: 121 - protein, 1178 aa, Bacillus thuringiensis kurstaki PS85A1
MDNNPNINECIPYNCLSNPEVEVLGGERIETGYTPIDISLSLTQFLLSEFVPGAGFVLGLVDIIWGIFGPSQWDAFLVQIEQLINQRIEEFARNQAISRLEGLSNLYQIYAESFREWEADPTNPALREEMRIQFNDMNSALTTAIPLLAVQNYQVPLLSVYVQAANLHLSVLRDVSVFGQRWGFDAATINSRYNDLTRLIGNYTDYAVRWYNTGLERVWGPDSRDWVRYNQFRRELTLTVLDIVALFPNYDSRRYPIRTVSQLTREIYTNPVLENFDGSFRGSAQGIERSIRSPHLMDILNSITIYTDAHRGYYYWSGHQIMASPVGFSGPEFTFPLYGTMGNAAPQQRIVAQLGQGVYRTLSSTLYRRPFNIGINNQQLSVLDGTEFAYGTSSNLPSAVYRKSGTVDSLDEIPPQNNNVPPRQGFSHRLSHVSMFRSGFSNSSVSIIRAPMFSWIHRSAEFNNIIASDSITQIPAVKGNFLFNGSVISGPGFTGGDLVRLNSSGNNIQNRGYIEVPIHFPSTSTRYRVRVRYASVTPIHLNVNWGNSSIFSNTVPATATSLDNLQSSDFGYFESANAFTSSLGNIVGVRNFSGTAGVIIDRFEFIPVTATLEAEYNLERAQKAVNALFTSTNQLGLKTNVTDYHIDQVSNLVTYLSDEFCLDEKRELSEKVKHAKRLSDERNLLQDSNFKDINRQPERGWGGSTGITIQGGDDVFKENYVTLSGTFDECYPTYLYQKIDESKLKAFTRYQLRGYIEDSQDLEIYLIRYNAKHETVNVPGTGSLWPLSAQSPIGKCGEPNRCAPHLEWNPDLDCSCRDGEKCAHHSHHFSLDIDVGCTDLNEDLGVWVIFKIKTQDGHARLGNLEFLEEKPLVGEALARVKRAEKKWRDKREKLEWETNIVYKEAKESVDALFVNSQYDQLQADTNIAMIHAADKRVHSIREAYLPELSVIPGVNAAIFEELEGRIFTAFSLYDARNVIKNGDFNNGLSCWNVKGHVDVEEQNNQRSVLVVPEWEAEVSQEVRVCPGRGYILRVTAYKEGYGEGCVTIHEIENNTDELKFSNCVEEEIYPNNTVTCNDYTVNQEEYGGAYTSRNRGYNEAPSVPADYASVYEEKSYTDGRRENPCEFNRGYRDYTPLPVGYVTKELEYFPETDKVWIEIGETEGTFIVDSVELLLMEE

SEQ ID NO: 122 - protein, 1177 aa, Bacillus thuringiensis kurstaki PS81GG; identical to SEQ ID NO: 101

SEQ ID NO: 123 - protein, 607 aa, Bacillus thuringiensis kurstaki NRD-12
MDNNPNINECIPYNCLSNPEVEVLGGERIETGYTPIDISLSLTQFLLSEFVPGAGFVLGLVDIIWGIFGPSQWDAFLVQIEQLINQRIEEFARNQAISRLEGLSNLYQIYAESFREWEADPTNPALREEMRIQFNDMNSALTTAIPLLAVQNYQVPLLSVYVQAANLHLSVLRDVSVFGQRWGFDAATINSRYNDLTRLIGNYTDYAVRWYNTGLERVWGPDSRDWVRYNQFRRELTLTVLDIVALFPNYDSRRYPIRTVSQLTREIYTNPVLENFDGSFRGSAQGIERSIRSPHLMDILNSITIYTDAHRGYYYWSGHQIMASPVGFSGPEFTFPLYGTMGNAAPQQRIVAQLGQGVYRTLSSTFYRRPFNIGINNQQLSVLDGTEFAYGTSSNLPSAVYRKSGTVDSLDEIPPQNNNVPPRQGFSHRLSHVSMFRSGSSSSVSIIRAPMFSWIHRSAEFNNIIASDSITQIPAVKGNFLFNGSVISGPGFTGGDLVRLNSSGNNIQNRGYIEVPIHFPSTSTRYRVRVRYASVTPIHLNVNWGNSSIFSNTVPATATSLDNLQSSDFGYFESANAFTSSLGNIVGVRNFSGTAGVIIDRFEFIPV

SEQ ID NO: 124 - protein, 1178 aa, Bacillus thuringiensis kurstaki HD73; identical to SEQ ID NO: 94

SEQ ID NO: 125 - protein, 1178 aa, Bacillus thuringiensis kurstaki HD73; identical to SEQ ID NO: 94

SEQ ID NO: 126 - protein, 1178 aa, Bacillus thuringiensis DSIR732; identical to SEQ ID NO: 94

SEQ ID NO: 127 - protein, 1179 aa, Bacillus thuringiensis aizawai PS81I
MEIMNNQNQCVPYNCLNDPTIEILEGERIETGYTPIDISLSLTQFLLSEFVPGAGFVLGLIDLIWGFVGPSQWDAFLVQIEQLINQRIEEFARNQAISRLEGLSNLYQIYAEAFREWEADPTNPALTEEMRIQFNDMNSALTTAIPLFTVQNYQVPLLSVYVQAANLHLSVLRDVSVFGQRWGFDVATINSRYNDLTRLIGTYTDYAVRWYNTGLERVWGPDSRDWVRYNQFRRELTLTVLDIVSLFPNYDSRTYPIRTVSQLTREIYTNPVLENFDGSFRGMAQRIEQNIRQPHLMDLLNSITIYTDVHRGFNYWSGHQITASPVGFAGPEFTFPRYGTMGNAAPPVLISTTGLGIFRTLSSPLYRRIILGSGPNNQNLFVLDGTEFSFASLTADLPSTIYRQRGTVDSLDVIPPQDNSVPARAGFSHRLSHVTMLSQAAGAVYTLRAPTFSWRHRSAEFSNLIPSSQITQIPLTKSINLGSGTSVVKGPGFTGGDILRITSPGQISTLRVTITAPLSQRYRVRIRYASTTNLQFHTSIDGRPINQGNFSATMSSGGNLQSGSFRTAGFTTPFNFSNGSSIFTLSAHVFNSGNEVYIERIEFVPAEVTFEAEYDLERAQEAVNALFTSSNQLGLKTNVTDYHIDQVSNLVECLSGEFCLDEKRELSEKVKHANRLSDERNLLQDPNFRGINRQPDRGWRGSTDITIQGGDDVFKENYVTLPGTFNECYPTYLYQKIDESKLKAYTRYQLRGYIEDSQHLEIYLIRYNTKHETVNVPGTGSLWPLSVENPIGKCGEPNRCAPQLEWNPDLDCSCRDGEKCAHHSHHFSLDIDIGCTDLNENLGVWVIFKIKMQDGHARLGNLEFLEEKPLVGESLARVKRAEKKWRDKREKLQVETNIVYKEAKESVDALFVNSQYDRLQADTDIAMIHAADKRVHRIREAYLPELSVIPGVNAGIFEELEGRIFTAYSLYDARNVIKNGDFNNGLSCWNVKGHVDVEEQNNHRSVLVVPEWEAEVSQEVRVCPGRGYILRVTAYKEGYGEGCVTIHEIEDNTDELKFSNCVEEEVYPNNTVTCNDYTANQEEYGGAYTSRNRGYGESYESNSSIPAEYAPVYEEAYIDGRKENPCESNRGYGDYTPLPAGYVTKELEYFPETDKVWIEIGETEGTFIVDSVELLLMEE

SEQ ID NO: 128 - protein, 1179 aa, Bacillus thuringiensis PS81RR1
MEIMNNQNQCVPYNCLNDPTIEILEGERIETGYTPIDISLSLTQFLLSEFVPGAGFVLGLIDLIWGFVGPSQWDAFLVQIEQLINQRIEEFARNQAISRLEGLSNLYQIYAEAFREWEADPTNPALTEEMRIQFNDMNSALTTAIPLFTVQNYQVPLLSVYVQAANLHLSVLRDVSVFGQRWGFDVATINSRYNDLTRLIGTYTDYAVRWYNTGLERVWGPDSRDWVRYNQFRRELTLTVLDIVSLFPNYDSRTYPIRTVSQLTREIYTNPVLENFDGSFRGMAQRIEQNIRQPHLMDLLNSITIYTDVHRGFNYWSGHQITASPVGFAGPEFTFPRYGTMGNAAPPVLISTTGLGIFRTLSSPLYRRIILGSGPNNQNLFVLDGTEFSFASLTADLPSTIYRQRGTVDSLDVIPPQDNSVPARAGFSHRLSHVTMLSQAAGAVYTLRAPTFSWRHRSAEFSNLIPSSQITQIPLTKSINLGSGTSVVKGPGFTGGDILRRTSPGQISTLRVTITAPLSQRYRVRIRYASTTNLQFHTSIDGRPINQGNFSATMSSGGNLQSGSFRTAGFTTPFNFSNGSSIFTLSAHVFNSGNEVYIDRIEFVPAEVTFEAEYDLERAQEAVNALFTSSNQLGLKTNVTDYHIDQVSNLVECLSGEFCLDEKRELSEKVKHAKRLSDERNLLQDPNFRGINRQPDRGWRGSTDITIQGGDDVFKENYVTLPGTFNECYPTYLYQKIDESKLKAYTRYQLRGYIEDSQDLEIYLIRYNTKHETVNVPGTGSLWPLSVENPIGKCGEPNRCAPQLEWNPDLDCSCRDGEKCAHHSHHFSLDIDIGCTDLNENLGVWVIFKIKTQDGHARLGNLEFLEEKPLVGESLARVKRAEKKWRDKREKLQVQTNIVYKEAKESVDALFVNSQYDRLQADTDIAMIHAADKRVHRIREAYLPELSVIPGVNAGIFEELEGRIFTAYSLYDARNLIKNGDFNNGLSCWNVKGHVDVEEQNNHRSVLVVPEWEAEVSQEVRVCPGRGYILRVTAYKEGYGEGCVTIHEIEDNTDELKFSNCVEEEVYPNNTVTCNDYTANQEQYGGAYTSRNRGYGESYESNSSIPAEYAPVYEEAYIDGRKENPCESNRGYGDYTPLPAGYVTKELEYFPETDKVWIEIGETEGTFIVDSVELLLMEE

SEQ ID NO: 129 - protein, 1181 aa, Bacillus thuringiensis alesti
MDNNPKINECIPYNCLSNPEVEVLGGERIETGYTPIDISLSLTQFLLSEFVPGAGFVLGLIDLIWGFVGPSQWDAFLVQIEQLISQRIEEFARNQAISRLEGLSNLYQIYAEAFREWEADPTNPALREEMRIQFNDMNSALTTAIPLFTVQNYQVPLLSVYVQAVNLHLSVLRDVSVFGQRWGLDVATINSRYNDLTRLIGTYTDYAVRWYNTGLERVWGPDSRDWVRYNQFRRELTLTVLDIVSLFPNYDSRTYPIRTVSQLTREIYTNPVLENFDGSFRGSAQRIEQSIRSPHLMDILNSITIYTDAHGGYYYWSGHQIMASPVGFSGPEFTFPLYGTMGNAAPQQRIVAQLGQGVYRTLSSTFYRNPFIIGINNQRLSVLDGTEFAYGSSSNLPSAVYRKSGTVDSLDEIPPQDNNVPPRQGFSHRLSHVSMFRSGFSNSSVSIIRAPMFSWIHRSAEFNNIIPSSQITQIPLTKSTNLGSGTSVVKGPGFTGGDILRRTSPGQISTLRVNITAPLSQRYRVRIRYASTTNLQFHTSIDGRPINQGNFSATMSSGGNLQSGSFRTVGFTTPFNFSNGSSVFTLSAHVFNSGNEVYIDRIEFVPAEVTFEAEYDLERAQEAVNALFTSPNQIGLKTDVTDYHIDQVSNLVECLSDEFCLDEKRELSEKVKHAKRLSDERNLLQDPNFRGINRQPDRGWRGSTDITIQGGDDVFKENYVTLPGTFDECYPTYLYQKIDESKLKAYTRYELRGYIEDSQDLEIYLIRYNAKHETVNVPGTGSLWPLSFESSIGKCGEPNRCAPHLEWNPDLDCSCRDGEKCAHHSHHFSLDIDVGCIDLNEDLGVWVIFKIKTQDGHARLGNLEFLEEKPLVGEALARVKRAEKKWRDKREKLQLETNIVYKEAKESVDALFVNSQYDQLQADTNIAMIHTADKRVHRIQEAYLPELSVIPGVNAGIFEELEGRIFTAYSLYDARNVIKNGDFNNGLSCWNVKGHVDVEEQNNHRSVLVVPEWEAEVSQEVRVCPGRGYILRVTAYKEGYGEGCVTIHEIENNTDELKFSNCVEEEVYPNNTVTCNEYTANQEEYGGAYTSCNRGYDETYGSNYSVPADYASVYEEKAYTDGRRENPCESNRGYGDYTPLPAGYVTKQLEYFPETDKVWIEIGETEGTFIVDSVELFLMEE

SEQ ID NO: 130 - protein, 911 aa, Bacillus thuringiensis NT0423
MDNNPNINECIPYNCLSNPEVEVLGGERIETGYTPIDISLSLTQFLLSEFVPGAGFVLGLVDIIWEIFSVLSSDAFLVQIEQLINQRIEEFARNQAISRLEGLSNLYQIYAESFREWEADPTNPALREEMRIQFNDMNSALTTAIPLFAVQNYQVPLLSVYVTCNYIISSESVMCGQRSGFDAATINSRYNDLTRLIGNYTDHAVRWYNTGLERVWGPDSRDWIRYNQFRRELTLTVLDIVSLFPNYDSRTYPIRTVSQLTREIYTNPVLENFDGSFRGSAQGIEGSIRSPHLMDILNSITIYTDAHRGEYYWSGHQIMASPVGFSGPEFTFPLYGTMGNSAPQQRIVAQLGQGVYRTLSSTLYRRPFNIGINNQQLSVLDGTEFAYGTSSNLPSAVYRKSGTVDSLDEIPPQNNNVPPRQGFSHRLSHVSMFRSGFSNSSVSIIRAPMFSWIHRSAEFNNIIPSSQITQIPLTKSTNLGSGTSVVKGPGFTGGDILRRTSPGQISTLRVNITAPLSQRYRVRILYASTTNLQFHTSIDGRPINQGNFSATMSSGRNLQSGSLRTVGFTTPFNFSNGSSVFTLSAHVFNSGNEVYIDRIEFVPAEVTFEAEYDLERAQKAVNELFTSSNQIGLKTDVTDYHIDQVSNLVECLSDEFCLDEKKELSEKVKHAKRLSDERNLLQDPNFRGINRQLDRGWRRSTDITTQGGDDFFQENYVTLLGTLMGFPSIYIKKWWFEIKSLYPLPIRGYIEDSQDLEIYLIRYNAKHETVNVPGTVPYGRFQPQVPIGKCAHHSHHFSLDIDVGCTDLNEDLGVWVIFKIKTQDGHARLGNLEFLEEKPLVGEALARVKRAEKKWRDKREKLEWETNIVYKEAKESVDALFVNSQYDRLQADTNIAMIHAADKRVHSIREA

SEQ ID NO: 131 - protein, 1176 aa, Bacillus thuringiensis
MDNNPNINECIPYNCLSNPEVEVLGGERIETGYTPIDISLSLTQFLLSEFVPGAGFVLGLVDIIWGIFGPSQWDAFLVQIEQLINQRIEEFARNQAISRLEGLSNLYQIYAESFREWEADPTNPALREEMRIQFNDMNSALTTAIPLLAVQNYQVPLLSVYVQAANLHLSVLRDVSVFGQRWGFDAATINSRYNDLTRLIGNYTDYAVRWYNTGLERVWGPDSRDWVRYNQFRRELTLTVLDIVALFSNYDSRRYPIRTVSQLTREIYTNPVLENFDGSFRGMAQRIEPEYRQPHLMDILNSISIYTDVHRGFNYWSGHQITTSPVGFSGPEFTFPLYGTYGNAAPPQRIAQTGLGIFRTLSSPLYRRIILGSGPNNQELFVLDGTEFSFASLTTNLPSTIYRQRGTVDSLDVIPPQDNSVPPRAGFSHRLSHVPMLSQAAGAVYTLRASLFLLLVLLIHARSIFNNIIPSSQITQSFKKIISWTSVVKGPGFTGGDILRRPSPGLISTLRVNITAPLSQRYRVRIRYAFTTNLQFLTSIDGRPINQGNFYATMSSGSNLQSGSFRTVGFTTPFNFSNGSSVFTLSAHVFNSGNEVYIDRIEFVPAEVTFEAEYDLERAQNGVNQLFTSSNQIGLKTDGTDYHIDQVSNLVECLSDEFCLDEKQELSEKVKHAKRLSDERNLLQDPNFRGINRQLDRGWRGSHDITIQGGDDVFKENYVTLLGTFDECYPTYLYQKIDQSKLKAYTSYQLRGYIEDSQDLEIYLIGYNAKQQTVNVPGTGSLWPVYAPKPIGKCGEPNRCAPHLEWNPDLDCSCRDGEKCAHHSLHFSIDIDVGCTDLNEDLGVWVIFKIKTEDGHARLGNLEFLEEKPLVGEALARVKRAEKKWRDKRVKLEWETNIVYKEAKESVDALFVNSQYDQLQADTNIAMIHAADKRVHSIREAYLPELSVIPGVNAAIFEELEGRIFTAFSLYDARNVIKNGDFNNGLSCWNVKGHVDVEEQNNQRSVLVVPEWEAEVSQEVRVCPGRGYFPRVTAYKEGYGEGCVTIHEIENNTDELKFSNCVEEEIYPNNTVTCNDYTVNQEEYGGAYTSRNRGYNEAPSVPADYASVYEEKSYTDGRRENPCEFNRGYRDYTGLPVGYVTKALEYFPETDKVWIEIGETEGTFIVDSVELLLMEE

SEQ ID NO: 132 - protein, 1182 aa, Bacillus thuringiensis
MKNSIKLSELWYFNERKWRYFMEIVNNQNQCVPYNCLNNPEIEILEGGRISVGNTPIDISLSLTQFLLSEFVPGAGFVLGLIDLIWGFVGPSQWDAFLAQVEQLINQRIAEAVRNTAIQELEGMARVYRTYATAFAEWEKAPDDPELREALRTQFTATETYISGRISVLKIQTFEVQLLSVFAQAANLHLSLLRDVVFFGQRWGFSTTTVNNYYNDLTEGISTYTDYAVRWYNTGLERVWGPDSRDWVRYNQFRRELTLTVLDIVALFPNYDSRRYPIRTVSQLTREIYTNPVLENFDGSFRGSAQGIERSIRSPHLMDILNSITIYTDAHRGYYYWSGHQIMASPVGFSGPEFTFPLYGTMGNAAPQQRIVAQLGQGVYRTLSSTFYRRPFNIGINNQQLSVLDGTEFAYGTSSNLPSAVYRKSGTVDSLDEIPPQNNNVPPRQGFSHRLSHVSMFRSGSSSSVSIIRAPMFSWIHRSAEFNNIIASDSITQIPAVKGNFLFNGSVISGPGFTGGDLVRLNSSGNNIQNRGYIEVPIHFPSTSTRYRVRVRYASVTPIHLNVNWGNSSIFSNTVPATATSLDNLQSSDFGYFESANAFTSSLGNIVGVRNFSGTAGVIIDRFEFIPVTATLEAEYNLERAQKAVNALFTSTNQLGLKTNVTDYHIDQVSNLVTCLSDEFCLDEKRELSEKVKHAKRLSDERNLLQDSNFKDINRQPERGWGGSTGITIQGVDDVFKENYVTLSGTFDECYPTYLYQKIDESKLKAFTRYQLRGYIEDSQDLEVYLIRYNAKHETLNVPGTGSLWPLAVKSPIGRCGEPNRCAHHSHHFSLDIDVGCTDLNEDLGVWVIFKIKTQDGHAKIGNLEFLEEKLLLGEALARVKKAEKKWRDKREKLEWETNIVYKEAKESVDALFVDSQYNRLQTDTNIAMIHAADKRVHRIREAYLPELSVIPGVNAAIFEELEGLIFTAFSLYDARNVIKNGDFNYGLSCWNVKGHVDVEEQNNHRSVLVIPEWEAEVSQEVRVCPGRGYILRVTAYKEGYGEGCVTIHEIEDNTDELKFSNCVEEEVYPNNTVTCNDYTATQEEYEGTYTSRNRGYDGAYESNSSVPADYASAYEEKAYTDGRRDNPCESNRGYRDYTPLPAGYVTKELEYFPETDKVWIEIGETEGTFIVDSVELLLMEE

SEQ ID NO: 133 - protein, 850 aa, Bacillus thuringiensis alesti
MEIVNNQNQCVPYNCLNNPEIEILEGGRISVGNTPIDISLSLTQFLLSEFVPGAGFVLGLIDLIWGFVGPSQWDAFLAQVEQLINQRIAEAVRNTAIQELEGMARVYRTYATAFAEWEKAPDDPELREALRTQFTATETYISGRISVLKIQTFEVQLLSVFAQAANLHLSLLRDVVFFGQRWGFSTTTVNNYYNDLTEGISTYTDYAVRWYNTGLERVWGPDSRDWVRYNQFRRELTLTVLDIVALFPNYDSRRYPIRTVSQLTREIYTNPVLENFDGSFRGSAQGIERSIRSPHLMDILNSITIYTDAHRGYYYWSGHQIMASPVGFSGPEFTFPLYGTMGNAAPQQRIVAQLGQGVYRTLSSTFYRRPFNIGINNQQLSVLDGTEFAYGTSSNLPSAVYRKSGTVDSLDEIPPQNNNVPPRQGFSHRLSHVSMFRSGSSSSVSIIRAPMFSWIHRSAEFNNIIASDSITQIPAVKGNFLFNGSVISGPGFTGGDLVRLNSSGNNIQNRGYIEVPIHFPSTSTRYRVRVRYASVTPIHLNVNWGNSSIFSNTVPATATSLDNLQSSDFGYFESANAFTSSLGNIVGVRNFSGTAGVIIDRFEFIPVTATLEAEYNLERAQKAVNALFTSTNQLGLKTNVTDYHIDQVSNLVTCLSDEFCLDEKRELSEKVKHAKRLSDERNLLQDSNFKDINRQPERGWGGSTGITIQGGDDVFKENYVTLSGTFDECYPTYLYQKIDESKLKAFTRYQLRGYIEDSQDLEVYLIRYNAKHETLNVPGTGSLWPLAVKSPIGRCGEPNRCAHHSHHFSLDIDVGCTDLNEDLGVWVIFKIKTQDGHAKIGNLEFLEEKL

SEQ ID NO: 134 - protein, 1181 aa, Bacillus thuringiensis
MDNNPNINECIPYNCLSNPEVEVLGGERIETGYTPIDISLSLTQFLLSEFVPGAGFVLGLVDIIWGIFGPSQWDAFLVQIEQLINQRIEEFARNQAISRLEGLSNLYQIYAESFREWEADPTNPALREEMRIQFNDMNSALTTAIPLFAVQNYQVPLLSVYVQAANLHLSVLRDVSVFGQRWGFDAATINSRYNDLTRLIGNYTDYAVRWYNTGLERVWGPDSRDWVRYNQFRRELTLTVLDIVALFSNYDSRRYPIRTVSQLTREIYTNPVLENFDGSFRGMAQRIEQNIRQPHLMDILNSITIYTDVHRGFNYWSGHQITASPVGFSGPEFAFPLFGNAGNAAPPVLVSLTGLGIFRTLSSPLYRRIILGSGPNNQELFVLDGTEFSFASLTTNLPSTIYRQRGTVDSLDVIPPQDNSVPPRAGFSHRLSHVTMLSQAAGAVYTLRAPTFSWQHRSAEFNNIIASDSITQIPAVKGNFLFNGSVISGPGFTGGDLVRLNSSGNNIQNRGYIEVPIHFPSTSTRYRVRVRYASVTPIHLNVNWGNSSIFSNTVPATATSLDNLQSSDFGYFESANAFTSSLGNIVGVRNFSGTAGVIIDRFEFIPVTATLEAEYNLERAQKAVNALFTSTNQLGLKTNVTDYHIDQVSNLVTCLSDEFCLDEKRELSEKVKHAKRLSDERNLLQDSNFKDINRQPERGWGGSTGITIQGGDDVFKENYVTLSGTFDECYPTYLYQKIDESKLKAFTRYQLRGYIEDSQDLEVYLIRYNAKHETLNVPGTGSLWPLAVKSPIGRCGEPNRCAPRIEWKPDVDCSCRDGEKCAHHSHHFSLDIDVGCTDLNEDLGVWVIFKIKTQDGHAKIGNLEFLEEKLLLGEALARVKKAEKKWRDKREKLEWETNIVYKEAKESVDALFVDSQYNRLQTDTNIAMIHAADKRVHRIREAYLPELSVIPGVNAAIFEELEGLIFTAFSLYDARNVIKNGDFNYGLSCWNVKGHVDVEEQNNHRSVLVIPEWEAEVSQEVRVCPGRGYILRVTAYKEGYGEGCVTIHEIEDNTDELKFSNCVEEEVYPNNTVTCNDYTATQEEYEGTYTSRNRGYDGAYESNSSVPADYASAYEEKAYTDGRRDNPCESNRGYRDYTPLPAGYVTKELEYFPETDKVWIEIGETEGTFIVDSVELLLMEE

SEQ ID NO: 135 - protein, 1155 aa, Bacillus thuringiensis kunthala nags3
MDNNPNINECIPYNCLSNPEVEVLGGERIETGYTPIDISLSLTQFLLSEFVPGAGFVLGLVDIIWGIFGPSQWDAFLVQIEQLINQRIENSLGTKPFLDWKAKQSLSNLRRIFREWEADPTNPALREEMRIQFNARTSALTTAIPLFAVQNYQVPLLSVYVQAANLMFSTRRVQPFSRVVAVTPGYQSRYNFKRCYWGAREFLEDVGAIRDKSNFKKEDSKQLCCYLGIFRLSSYFFKIYEKFRTRVYPISESKFSPINKRNLYKPSIKKFSMVVFEARLRARRKYWSPHLWIYLNQDNHLTDVHRGFNYWSGHQIIASPVGFQDPEFAFPLFGNAGNAAPPVRIVYQLGQGVYRTLSSTLYEDLFIRDKVINTYLFLAGSNLLMEPPHICHPGRYRKSGTVDSLDEIPHQNNNVPPRQGFSHRLSHVSMFRSGFSNSSVSIIRAPMFSWILRSAEFNNIIPSSQITQIPLTKSTNLGSGTSVVKGPGFTGGDILRRTSPGQISTLRVNITAPLSQRYRVRIRYASTTNLQFHTSIDGRPINQGNFSATMSSGSNLQSASFRTVGFTTPFNFSNGSSVFTLSAHVFNSGNEVYIDRIEFVPAEVTFEAEYDLERAQKAVNELFTSSNQIGLKTDVTDYHIDQVSNLVECLSDEFCLDEKQELSEKVKHAKRLSDERNLLQDPNFRGINRQLDRGWRGSTDITIQGGDDVFKENYVTLLGTFDECYPTYLYQKIDESKLKAYTRYQLRGYIEDSQDLESIYIRESVESESVDAPRMESDLRLFGRDGQKMCPSFPSFLLRHYVGCTDLNEDLGVWVIFKIKTQDGHARLGNLEFLEEKPLVGEALARVKRAEKKWRDKREKLEWETNIVYKEAKESVHALFVNSQYDQLQAETNIAMIHAADKRVHSIRKAYLPELAVIPGVNAGIFEELEGRIFTAFSLYDARNVIKNGAFEYMAYPAGTERACRCRRTKQPPFGPCCSGMGSRSVTRSSCLSGSWLYPSCHSVQGGIGEGCVTIHEIENNTDELKFSNCVEEEVYPNNTVTCKIILRLKKNRRVPYTSRNRGYDGAYESNSSVQLIMHQPMKKKHIQMDEETILVNLTEDMGITHHYQRGYVTKELEYFQKPIRYGLRSEKRKEHSSWTAWNYFLWRNNICFIM

SEQ ID NO: 136 - protein, 1228 aa, Bacillus thuringiensis thuringiensis HD2
MTSNRKNENEIINAVSNHSAQMDLLPDARIEDSLCIAEGNNIDPFVSASTVQTGINIAGRILGVLGVPFAGQLASFYSFLVGELWPRGRDQWEIFLEHVEQLINQQITENARNTALARLQGLGDSFRAYQQSLEDWLENRDDARTRSVLYTQYIALELDFLNAMPLFAIRNQEVPLLMVYAQAANLHLLLLRDASLFGSEFGLTSQEIQRYYERQVERTRDYSDYCVEWYNTGLNSLRGTNAASWVRYNQFRRDLTLGVLDLVALFPSYDTRTYPINTSAQLTREVYTDAIGATGVNMASMNWYNNNAPSFSAIEAAAIRSPHLLDFLEQLTIFSASSRWSNTRHMTYWRGHTIQSRPIGGGLNTSTHGATNTSINPVTLRFASRDVYRTESYAGVLLWGIYLEPIHGVPTVRFNFTNPQNISDRGTANYSQPYESPGLQLKDSETELPPETTERPNYESYSHRLSHIGIILQSRVNVPVYSWTHRSADRTNTIGPNRITQIPMVKASELPQGTTVVRGPGFTGGDILRRTNTGGFGPIRVTVNGPLTQRYRIGFRYASTVDFDFFVSRGGTTVNNFRFLRTMNSGDELKYGNFVRRAFTTPFTFTQIQDIIRTSIQGLSGNGEVYIDKIEIIPVTATFEAEYDLERAQEAVNALFTNTNPRRLKTDVTDYHIDQVSNLVACLSDEFCLDEKRELLEKVKYAKRLSDERNLLQDPNFTSINKQPDFISTNEQSNFTSIHEQSEHGWWGSENITIQEGNDVFKENYVTLPGTFNECYPTYLYQKIGESELKAYTRYQLRGYIEDSQDLEIYLIRYNAKHETLDVPGTESLWPLSVESPIGRCGEPNRCAPHFEWNPDLDCSCRDGEKCAHHSHHFSLDIDVGCTDLHENLGVWVVFKIKTQEGHARLGNLEFIEEKPLLGEALSRVKRAEKKWRDKREKLQLETKRVYTEAKEAVDALFVDSQYDRLQADTNIGMIHAADKLVHRIREAYLSELPVIPGVNAEIFEELEGHIITAISLYDARNVVKNGDFNNGLTCWNVKGHVDVQQSHHRSDLVIPEWEAEVSQAVRVCPGCGYILRVTAYKEGYGEGCVTIHEIENNTDELKFKNREEEEVYPTDTGTCNDYTAHQGTAGCADACNSRNAGYEDAYEVDTTASVNYKPTYEEETYTDVRRDNHCEYDRGYVNYPPVPAGYVTKELEYFPETDTVWIEIGETEGKFIVDSVELLLMEE

SEQ ID NO: 137 - protein, 1228 aa, Bacillus thuringiensis entomocidus HD110
MTSNRKNENEIINAVSNHSAQMDLLPDARIEDSLCIAEGNNIDPFVSASTVQTGINIAGRILGVLGVPFAGQLASFYSFLVGELWPRGRDQWEIFLEHVEQLINQQITENARNTALARLQGLGDSFRAYQQSLEDWLENRDDARTRSVLHTQYIALELDFLNAMPLFAIRNQEVPLLMVYAQAANLHLLLLRDASLFGSEFGLTSQEIQRYYERQVERTRDYSDYCVEWYNTGLNSLRGTNAASWVRYNQFRRDLTLGVLDLVALFPSYDTRTYPINTSAQLTREVYTDAIGATGVNMASMNWYNNNAPSFSAIEAAAIRSPHLLDFLEQLTIFSASSRWSNTRHMTYWRGHTIQSRPIGGGLNTSTHGATNTSINPVTLRFASRDVYRTESYAGVLLWGIYLEPIHGVPTVRFNFTNPQNISDRGTANYSQPYESPGLQLKDSETELPPETTERPNYESYSHRLSHIGIILQSRVNVPVYSWTHRSADRTNTIGPNRITQIPMVKASELPQGTTVVRGPGFTGGDILRRTNTGGFGPIRVTVNGPLTQRYRIGFRYASTVDFDFFVSRGGTTVNNFRFLRTMNSGDELKYGNFVRRAFTTPFTFTQIQDIIRTSIQGLSGNGEVYIDKIEIIPVTATFEAEYDLERAQEAVNALFTNTNPRRLKTDVTDYHIDQVSNLVACLSDEFCLDEKRELLEKVKYAKRLSDERNLLQDPNFTSINKQPDFISTNEQSNFTSIHEQSEHGWWGSENITIQEGNDVFKENYVTLPGTFNECYPTYLYQKIGESELKAYTRYQLRGYIEDSQDLEIYLIRYNAKHETLDVPGTESLWPLSVESPIGRCGEPNRCAPHFEWNPDLDCSCRDGEKCAHHSHHFSLDIDVGCTDLHENLGVWVVFKIKTQEGHARLGNLEFIEEKPLLGEALSRVKRAEKKWRDKREKLQLETKRVYTEAKEAVDALFVDSQYDRLQADTNIGMIHAADKLVHRIREAYLSELPVIPGVNAEIFEELEGHIITAISLYDARNVVKNGDFNNGLTCWNVKGHVDVQQSHHRSDLVIPEWEAEVSQAVRVCPGCGYILRVTAYKEGYGEGCVTIHEIENNTDELKFKNREEEEVYPTDTGTCNDYTAHQGTAGCADACNSRNAGYEDAYEVDTTASVNYKPTYEEETYTDVRRDNHCEYDRGYVNYPPVPAGYVTKELEYFPETDTVWIEIGETEGKFIVDSVELLLMEE

SEQ ID NO: 138 - protein, 1228 aa, Bacillus thuringiensis
MTSNRKNENEIINAVSNHSAQMDLLPDARIEDSLCIAEGNNIDPFVSASTVQTGINIAGRILGVLGVPFAGQLASFYSFLVGELWPRGRDQWEIFLEHVEQLINQQITENARNTALARLQGLGDSFRAYQQSLEDWLENRDDARTRSVLYTQYIALELDFLNAMPLFAIRNQEVPLLMVYAQAANLHLLLLRDASLFGSEFGLTSQEIQRYYERQVERTRDYSDYCVEWYNTGLNSLRGTNAASWVRYNQFRRDLTLGVLDLVALFPSYDTRTYPINTSAQLTREVYTDAIGATGVNMASMNWYNNNAPSFSAIEAAAIRSPHLLDFLEQLTIFSASSRWSNTRHMTYWRGRTIQSRPIGGGLNTSTHGATNTSINPVTLRFASRDVYRTESYAGVLLWGIYLEPIHGVPTVRFNFTNPQNISDRGTANYSQPYESPGLQLKDSETELPPETTERPNYESYSHRLSHIGIILQSRVNVPVYSWTHRSADRTNTIGPNRITQIPMVKASELPQGTTVVRGPGFTGGDILRRTNTGGFGPIRVTVNGPLTQRYRIGFRYASTVDFDFFVSRGGTTVNNFRFLRTMNSGDELKYGNFVRRAFTTPFTFTQIQDIIRTSIQGLSGNGEVYIDKIEIIPVTATFEAEYDLERAQEAVNALFTNTNPRRLKTDVTDYHIDQVSNLVACLSDEFCLDEKRELLEKVKYAKRLSDERNLLQDPNFTSINKQPDFISTNEQSNFTSIHEQSEHGWWGSENITIQEGNDVFKENYVTLPGTFNECYPTYLYQKIGESELKAYTRYQLRGYIEDSQDLEIYLIRYNAKHETLDVPGTESLWPLSVESPIGRCGEPNRCAPHFEWNPDLDCSCRDGEKCAHHSHHFSLDIDVGCTDLHENLGVWVVFKIKTQEGHARLGNLEFIEEKPLLGEALSRVKRAEKKWRDKREKLQLETKRVYTEAKEAVDALFVDSQYDRLQADTNIGMIHAADKLVHRIREAYLSELPVIPGVNAEIFEELEGHIITAISLYDARNVVKNGDFNNGLTCWNVKGHVDVQQSHHRSDLVIPEWEAEVSQAVRVCPGCGYILRVTAYKEGYGEGCVTIHEIENNTDELKFKNREEEEVYPTDTGTCNDYTAHQGTAGCADACNSRNAGYEDAYEVDTTASVNYKPTYEEETYTDVRRDNHCEYDRGYVNYPPVPAGYVTKELEYFPETDTVWIEIGETEGKFIVDSVELLLMEE

SEQ ID NO: 139 - protein, 1228 aa, Bacillus thuringiensis entomocidus HD9; identical to SEQ ID NO: 137

SEQ ID NO: 140 - protein, 1228 aa, Bacillus thuringiensis sfw-12; identical to SEQ ID NO: 136

SEQ ID NO: 141 - protein, 1228 aa, Bacillus thuringiensis S601
MTSNRKNENEIINAVSNHSAQMDLLPDARIEDSLCIAEGNNIDPFVSASTVQTGINIAGRILGVLGVPFAGQLASFYSFLVGELWPRGRDQWEIFLEHVEQLINQQITENARNTALARLQGLGDSFRAYQQSLEDWLENRDDARTRSVLYTQYIALELDFLNAMPLFAIRNQEVPLLMVYAQAANLHLLLLRDASLFGSEFGLTSQEIQRYYERQVERTRDYSDYCVEWYNTGLNSLRGTNAASWVRYNQFRRGLTLGVLGLVALFPSYDTRTYPINTSAQLTREVYTDAIGATGVNMASMNWYNNNAPSFSAIEAAAIRSPHLLDFLEQLTIFSASSRWSNTRHMTYWRGHTIQSRPIGGGLNTSTHGATNTSINPVTLRFASRDVYRTESYAGVLLWGIYLEPIHGVPTVRFNFTNPQNISDRGTANYSQPYESPGLQLKDSETELPPETTERPNYESYSHRLSHIGIILQSRVNVPVYSWTHRSADRTNTIGPNRITQIPMVKASELPQGTTVVRGPGFTGGDILRRTNTGGFGPIRVTVNGPLTQRYRIGFRYASTVDFDFFASRGGTTVNNFRFLRTMNSGDELKYGNFVRRAFTTPFTFTQIQNIIRTSIQGLSGNGEVYIDKIEIIPVTATFEAEYDLERAQEAVNALFTNTNPRRLKTDVTDYHIDQVSNLVACLSDEFCLDEKRELLEKVKYAKRLSDERNLLQDPNFTSINKQPDFISTNEQSNFTSIHEQSEHGWWGSENITIQEGNDVSKENYVTLPGTFNECYPTYLYQKIGESELKAYTRYQLEGYIEDSQDLEIYLIRYNAKHETLDVPGTESLWPLSVESPIGRCGEPNRCAPHFEWNPDLDCSCRDGEKCAHHSHHFSLDIDVGCTDLHENLGVWVVFKIKTQEGHARLGNLEFIEEKPLLGEALSRVKRAEKKWRDKREKLQLETKRVYTEAKEAVDALFVDSQYDRLQADTNIGMIHAADKLVHRIREAYLSELPVIPGVNAEIFEELEGHIITAISLYDARNVVKNGDFNNGLTCWNVKGHVDVQQSHHRSDLVIPEWEAEVSQAVRVCPGCGYILSVTAYKEGYGEGCVTIHEIENNTDELKFKNREEEEVYPTDTGTCNDYTAHQGTAGCADACNSRNAGYEDAYEVDTTASVNYKPTYEEETYTDVRRDNHCEYDRGYVNYPPVPAGYVTKELEYFPETDTVWIEIGETEGKFMVDSVELLLMEE

SEQ ID NO: 142 - protein, 1229 aa, Bacillus thuringiensis EG5847
MTSNRKNENEIINALSIPTVSNPSTQMNLSPDARIEDSLCVAEVNNIDPFVSASTVQTGINIAGRILGVLGVPFAGQLASFYSFLVGELWPSGRDPWEIFLEHVEQLIRQQVTENTRNTAIARLEGLGRGYRSYQQALETWLDNRNDARSRSIILERYVALELDITTAIPLFRIRNEEVPLLMVYAQAANLHLLLLRDASLFGSEWGMASSDVNQYYQEQIRYTEEYSNHCVQWYNTGLNNLRGTNAESWLRYNQFRRDLTLGVLDLVALFPSYDTRTYPINTSAQLTREIYTDPIGRTNAPSGFASTNWFNNNAPSFSAIEAAIFRPPHLLDFPEQLTIYSASSRWSSTQHMNYWVGHRLNFRPIGGTLNTSTQGLTNNTSINPVTLQFTSRDVYRTESNAGTNILFTTPVNGVPWARFNFINPQNIYERGATTYSQPYQGVGIQLFDSETELPPETTERPNYESYSHRLSHIGLIIGNTLRAPVYSWTHRSADRTNTIGPNRITQIPLVKALNLHSGVTVVGGPGFTGGDILRRTNTGTFGDIRLNINVPLSQRYRVRIRYASTTDLQFFTRINGTTVNIGNFSRTMNRGDNLEYRSFRTAGFSTPFNFLNAQSTFTLGAQSFSNQEVYIDRVEFVPAEVTFEAEYDLERAQKAVNALFTSTNPRRLKTDVTDYHIDQVSNMVACLSDEFCLDEKRELFEKVKYAKRLSDERNLLQDPNFTFISGQLSFASIDGQSNFPSINELSEHGWWGSANVTIQEGNDVFKENYVTLPGTFNECYPNYLYQKIGESELKAYTRYQLRGYIEDSQDLEIYLIRYNAKHETLDVPGTDSLWPLSVESPIGRCGEPNRCAPHFEWNPDLDCSCRDGERCAHHSHHFTLDIDVGCTDLHENLGVWVVFKIKTQEGYARLGNLEFIEEKPLIGEALSRVKRAEKKWRDKREKLQLETKRVYTEAKEAVDALFVDSQYDQLQADTNIGMIHAADKLVHRIREAYLSELPVIPGVNAEIFEELEGHIITAMSLYDARNVVKNGDFNNGLTCWNVKGHVDVQQSHHRSDLVIPEWEAEVSQAVRVCPGRGYILRVTAYKEGYGEGCVTIHEIENNTDELKFKNCEEEEVYPTDTGTCNDYTAHQGTAACNSRNAGYEDAYEVDTTASVNYKPTYEEETYTDVRRDNHCEYDRGYVNYPPVPAGYVTKELEYFPETDTVWIEIGETEGKFIVDSVELLLMEE

SEQ ID NO: 143 - protein, 1233 aa, Bacillus thuringiensis morrisoni
MTSNRKNENEIINALSIPTVSNPSTQMNLSPDARIEDSLCVAEVNNIDPFVSASTVQTGINIAGRILGVLGVPFAGQLASFYSFLVGELWPSGRDPWEIFLEHVEQLIRQQVTENTRNTAIARLEGLGRGYRSYQQALETWLDNRNDARSRSIILERYVALELDITTAIPLFRIRNEEVPLLMVYAQAANLHLLLLRDASLFGSEWGMASSDVNQYYQEQIRYTEEYSNHCVQWYNTGLNNLRGTNAESWLRYNQFRRDLTLGVLDLVALFPSYDTRTYPINTSAQLTREIYTDPIGRTNAPSGFASTNWFNNNAPSFSAIEAAIFRPPHLLDFPEQLTIYSASSRWSSTQHMNYWVGHRLNFRPIGGTLNTSTQGLTNNTSINPVTLQFTSRDVYRTESNAGTNILFTTPVNGVPWARFNFINPQNIYERGATTYSQPYQGVGIQLFDSETELPPETTERPNYESYSHRLSHIGLIIGNTLRAPVYSWTHRSADRTNTIGPNRITQIPLVKALNLHSGVTVVGGPGFTGGDILRRTNTGTFGDIRLNINVPLSQRYRVRIRYASTTDLQFFTRINGTTVNIGNFSRTMNRGDNLEYRSFRTAGFSTPFNFLNAQSTFTLGAQSFSNQEVYIDRVEFVPAEVTFEAEYDLERAQKAVNALFTSTNPRRLKTDVTDYHIDQVSNMVACLSDEFCLDEKRELFEKVKYAKRLSDERNLLQDPNFTFISGQLSFASIDGQSNFPSINELSEHGWWGSANVTIQEGNDVFKENYVTLPGTFNECYPNYLYQKIGESELKAYTRYQLRGYIENSQDLEIYLIRYNAKHEAINVPGTESIWSISAESTIGKCTEPNRCAPHYEWNPDLDCSCRDGEKCAHHSHHSTLDIDVGCTDLHENLGVWLIFKIKTQDGHARLGNLEYLEEKPLLGEALRRVKRTEKKWRDKREKLHLETKRVYTEAKESVDALFVDSQYDRLQANSNIGMIHAADKLVHSIREAYLSELPVIRGVNADIFEELEGHILTAFSLYDARNAVKNGDFNNGLTCWNVKGHVDVQQSHHRFDLVVPEWKAEVSQAVRVCPGCGYILRVTAYKEGYGEGCVTIHEIEENTDELNFKNRVEEEIYPPDTGTCKYYTENQGTRTCGNECGSRNEGYDNAYEINAKSSLEYRPTYEEETYTDVRRENHCEYARGYINYSPVPAGYVTKELEYFPETDTVWIEIGETEGKFIVDSVELLLMEE

SEQ ID NO: 144 - protein, 1231 aa, Bacillus thuringiensis wuhanensis HD525
MTSNRKNENEIINALSIPAVSNHSAQMDLSLDARIEDSLCIAEGNNINPLVSASTVQTGINIAGRILGVLGVPFAGQLASFYSFLVGELWPSGRDPWEIFLEHVEQLIRQQVTENTRNTAIARLEGLGRGYRSYQQALETWLDNRNDARSRSIILERYVALELDITTAIPLFRIRNEEVPLLMVYAQAANLHLLLLRDASLFGSEWGMASSDVNQYYQEQIRYTEEYSNHCVQWYNTGLNNLRGTNAESWLRYNQFRRDLTLGVLDLVALFPSYDTRTYPINTSAQLTREIYTDPIGRTNAPSGFASTNWFNNNAPSFSAIEAAIFRPPHLLDFPEQLTIYSASSRWSSTQHMNYWVGHRLNFRPIGGTLNTSTQGLTNNTSINPVTLQFTSRDVYRTESNAGTNILFTTPVNGVPWARFNFINPQNIYERGATTYSQPYQGVGIQLFDSETELPPETTERPNYESYSHRLSHIGLIIGNTLRAPVYSWTHRSADRTNTIGPNRITQIPAVKGRFLFNGSVISGPGFTGGDVVRLNRNNGNIQNRGYIEVPIQFTSTSTRYRVRVRYASVTSIELNVNLGNSSIFTNTLPATAASLDNLQSGDFGYVEINNAFTSATGNIVGARNFSANAEVIIDRFEFIPVTATFEAEYDLERAQKAVNALFTSTNPRRLKTDVTDYHIDQVSNMVACLSDEFCLDEKRELFEKVKYAKRLSDERNLLQDPNFTFISGQLSFASIDGQSNFTSINELSEHGWWGSENVTIQEGNDVFKENYVTLPGTFNECYPNYLYQKIGESELKAYTRYQLRGYIEDSQDLEIYLIRYNAKHETLDVPGTDSLWPLSVKSPIGRCGEPNRCAPHFEWNPDLDCSCRDGERCAHHSHHFTLDIDVGCTDLHENLGVWVVFKIKTQEGYARLGNLEFIEEKPLIGEALSRVKRAEKKWRDKREKLQLETKRVYTEAKETVDALFVDSHYNRLQADTNIGMIHAADRLVHRIHEAYLPELPFIPGINAVIFEELENRISTAFSLYDARNVIKNGDFNNGLSCWNVKGHVDVQQSHHRSDLVIPEWEAEVSQAVRVCPGRGYILRVTAYKEGYGEGCVTIHEIENNTDELKFKNCEEEEVYPTDTGTCNDYTAHQGTAACNSRNAGYEDAYEVDTTASVNYKPTYEEETYTDVRRDNHCEYDRGYVNYPPVPAGYVTKELEYFPETDTVWIEIGETEGKFIVDSVELLLMEE

SEQ ID NO: 145 - protein, 1231 aa, Bacillus thuringiensis 834
MTSNRKNENEIINALSIPTVSNPSTQMNLSPDARIEDSLCVAEVNNIDPFVSASTVQTGINIAGRILGVLGVPFAGQLASFYSFLVGELWPSGRDPWEIFLEHVEQLIRQQVTENTRNTAIARLEGLGRGYRSYQQALETWLDNRNDARSRSIILERYVALELDITTAIPLFRIRNEEVPLLMVYAQAANLHLLLLRDASLFGSEWGMASSDVNQYYQEQIRYTEEYSNHCVQWYNTGLNNLRGTNAESWLRYNQFRRDLTLGVLDLVALFPSYDTRTYPINTSAQLTREIYTDPIGRTNAPSGFASTNWFNNNAPSFSAIEAAIFRPPHLLDFPEQLTIYSASSRWSSTQHMNYWVGHRLNFRPIGGTLNTSTQGLTNNTSINPVTLQFTSRDVYRTESNAGTNILFTTPVNGVPWDRFNFINPQNIYERGATTYSQPYQGVGIQLFDSETELPPETTERPNYESYSHRLSHIGLIIGNTLRAPVYSWTHRSADRTNTIGPNRITQIPAVKGRFLFNGSVISGPGFTGGDVVRLNRNNGNIQNRGYIEVPIQFTSTSTRYRVRVRYASVTSIELNVNLGNSSIFTNTLPATAASLDNLQSGDFGYVEINNAFTSATGNIVGARNFSANAEVIIDRFEFIPVTATFEAEYDLERAQKAVNALFTSTNPRRLKTDVTDYHIDQVSNMVACLSDEFCLDEKRELFEKVKYAKRLSDERNLLQDPNFTFISGQLSFASIDGQSNFTSINELSEHGWWGSENVTIQEGNDVFKENYVTLPGTFNECYPNYLYQKIGESELKAYTRYQLRGYIEDSQDLEIYLIRYNAKHETLDVPGTDSLWPLSVKSPIGRCGEPNRCAPHFEWNPDLDCSCRDGERCAHHSHHFTLDIDVGCTDLHENLGVWVVFKIKTQEGYARLGNLEFIEEKPLIGEALSRVKRAEKKWRDKREKLQLETKRVYTEAKETVDALFVDSHYNRLQADTNIGMIHAADRLVHRIHEAYLPELPFIPGINAVIFEELENRISTAFSLYDARNVIKNGDFNNGLSCWNVKGHVDVQQSHHRSDLVIPEWEAEVSQAVRVCPGRGYILRVTAYKEGYGEGCVTIHEIENNTDELKFKNCEEEEVYPTDTGTCNDYTAHQGTAACNSRNAGYEDAYEVDTTASVNYKPTYEEETYTDVRRDNHCEYDRGYVNYPPVPAGYVTKELEYFPETDTVWIEIGETEGKFIVDSVELLLMEE

SEQ ID NO: 146 - protein, 1227 aa, Bacillus thuringiensis PS158C2
MTSNRKNENEIINALSIPAVSNHSAQMNLSTDARIEDSLCIAEGNNIDPFVSASTVQTGINIAGRILGVLGVPFAGQIASFYSFLVGELWPRGRDPWEIFLEHVEQLIRQQVTENTRDTALARLQGLGNSFRAYQQSLEDWLENRDDARTRSVLYTQYIALELDFLNAMPLFAIRNQEVPLLMVYAQAANLHLLLLRDASLFGSEFGLTSQEIQRYYERQVEKTREYSDYCARWYNTGLNNLRGTNAESWLRYNQFRRDLTLGVLDLVALFPSYDTRVYPMNTSAQLTREIYTDPIGRTNAPSGFASTNWFNNNAPSFSAIEAAVIRPPHLLDFPEQLTIFSVLSRWSNTQYMNYWVGHRLESRTIRGSLSTSTHGNTNTSINPVTLQFTSRDVYRTESFAGINILLTTPVNGVPWARFNWRNPLNSLRGSLLYTIGYTGVGTQLFDSETELPPETTERPNYESYSHRLSNIRLISGNTLRAPVYSWTHRSADRTNTISSDSITQIPLVKSFNLNSGTSVVSGPGFTGGDIIRTNVNGSVLSMGLNFNNTSLQRYRVRVRYAASQTMVLRVTVGGSTTFDQGFPSTMSANESLTSQSFRFAEFPVGISASGSQTAGISISNNAGRQTFHFDKIEFIPITATFEAEYDLERAQEAVNALFTNTNPRRLKTGVTDYHIDEVSNLVACLSDEFCLDEKRELLEKVKYAKRLSDERNLLQDPNFTSINKQPDFISTNEQSNFTSIHEQSEHGWWGSENITIQEGNDVFKENYVILPGTFNECYPTYLYQKIGEAELKAYTRYQLSGYIEDSQDLEIYLIRYNAKHETLDVPGTESVWPLSVESPIGRCGEPNRCAPHFEWNPDLDCSCRDGEKCAHHSHHFSLDIDVGCIDLHENLGVWVVFKIKTQEGHARLGNLEFIEEKPLLGEALSRVKRAEKKWRDKREKLQLETKRVYTEAKEAVDALFVDSQYDRLQADTNIGMIHAADKLVHRIREAYLSELSVIPGVNAEIFEELEGRIITAISLYDARNVVKNGDFNNGLACWNVKGHVDVQQSHHRSVLVIPEWEAEVSQAVRVCPGRGYILRVTAYKEGYGEGCVTIHEIENNTDELKFKNCEEEEVYPTDTGTCNDYTAHQGTAACNSRNAGYEDAYEVDTTASVNYKPTYEEETYTDVRRDNHCEYDRGYVNYPPVPAGYMTKELEYFPETDKVWIEIGETEGKFIVDSVELLLMEE

SEQ ID NO: 147 - protein, 1227 aa, Bacillus thuringiensis
LTSNRKNENEIINALSIPAVSNHSAQMNLSTDARIEDSLCIAEGNNIDPFVSASTVQTGINIAGRILGVLGVPFAGQIASFYSFLVGELWPRGRDPWEIFLEHVEHLIRQQVTENTRDTALARLQGLGNSFRAYQQSLEDWLENRDDARTRSVLYTQYIALELDFLNAMPLFAIRNQEVPLLMVYAQAANLHLLLLRDASLFGSEFGLTSQEIQRYYERQVEKTREYSDYCARWYNTGLNNLRGTNAESWLRYNQFRRDLTLGVLDLVALFPSYDTRVYPMNTSAQLTREIYTDPIGRTNAPSGFASTNWFNNNAPSFSAIEAAVIRPPHLLDFPEQLTIFSVLSRWSNTQYMNYWVGHRLESRTIRGSLSTWTHGNTNTSINPVTLQFTSRDVYRTESFAGINILLTTPVNGVPWARFNWRNPLNSLRGSLLYTIGYTGVGTQLFDSETELPPETTERPNYESYSHRLSNIRLISGNTLRAPVYSWTHRSADRTNTISSDSITQIPLVKSFNLNSGTSVVSGPGFTGGDIIRTNVNGSVLSMGLNFNNTSLQRYRVRVRYAASQTMVLRVTVGGSTTFDQGFPSTMSANESLTSQSFRFAEFPVGISASGSQTAGISISNNAGRQTFHFDKIEFIPITATFEAEYDLERAQEAVNALFTNTNPRRLKTGVTDYHIDEVSNLVACLSDEFCLDEKRELLEKVKYAKRLSDERNLLQDPNFTSINKQPDFNSNNEQSNFTSIHEQSEHGWWGSENITIQEGNDVFKENYVTLPGTFNECYPTYLYQKIGEAELKAYTRYQLSGYIEDSQDLEIYLIRYNAKHETLDVPGTESVWPLSVESPIGRCGEPNRCAPHFEWNPDLDCSCRDGEKCAHHSHHFSLDIDVGCIDLHENLGVWVVFKIKTQEGHARLGNLEFIEEKPLLGEALSRVKRAEKKWRDKREKLQLETKRVYTEAKEAVDALFVDSQYDRLQADTNIGMIHAADKLVHRIREAYLSELSVIPGVNAEIFEELEGRIITAISLYDARNVVKNGDFNNGLACWNVKGHVDVQQSHHRSVLVIPEWEAEVSQAVRVCPGRGYILRVTAYKEGYGEGCVTIHEIENNTDELKFKNCEEEEVYPTDTGTCNDYTAHQGTAVCNSRNAGYEDAYEVDTTASVNYKPTYEEETYTDVRRDNHCEYDRGYVNYPPVPAGYMTKELEYFPETDKVWIEIGETEGKFIVDSVELLLMEE

SEQ ID NO: 148 - protein, 1227 aa, Bacillus thuringiensis g9
MNSNRKNENEIINALSIPAVSNHSAQMNLSTDARIEDSLCIAEGNNIDPFVSASTVQTGINIAGRILGVLGVPFAGQIASFYSFLVGELWPRGRDPWEIFLEHVEQLIRQQVTENTRDTALARLQGLGNSFRAYQQSPEDWLGNRDDARTRSVLYTQYIALELDFLNAMPLFAIRNQEVPLLMVYAQAANLHLLLLRDASLFGSEFGLTSQEIQRYYERQVEKTREYSDYCARWYNTGLNNLRGTNAESWLRYNQFRRDLTLGVLDLVALFPSYDTRVYPMNTSAQLTREIYTDPIGRTNAPSGFASTNWFNNNAPSFSAIEAAVIRPPHLLDFPEQLTIFSVLSRWSNTQYMNYWVGHRLESRTIRGSLSTSTHGNTNTSINPVTLQFTSRDVYRTESLAGINILLTTPVNGVPWARFNWRNPLNSLRGSLLYTIGYTGVGTQLFDSETELPPETTERPNYESYSHRLSNIRLISGNTLRAPVYSWTHRSADRTNTISSDSITQIPLVKSFNLNSGTSVVSGPGFTGGDIIRTNVNGSVLSMGLNFNNTSLQRYRVRVRYAASQTMVLRVTVGGSTTFDQGFPSTMSANESLTSQSFRFAEFPVGISASGSQTAGISISNNAGRQTFHFDKIEFIPITATFEAEYDLERAQEAVNALFTNTNPRRLKTGVTDYHIDEVSNLVACLSDEFCLDEKRELLEKVKYAKRLSDERNLLQDPNFTSINKQPDFISTNEQSNFTSIHEQSEHGWWGSENITIQEGNDVFKENYVTLPGTFNECYPTYLYQKIGESELKAYTRYQLSGYIEDSQDLEIYLIRYNAKHETLDVPGTESVWSLSVESPIGRCGEPNRCAPHFEWNPDLDCSCRDGEKCAHHSHHFSLDIDVGCIDLHENLGVWVVFKIKTQEGHARLGNLEFIEEKPLLGEALSRVKRAEKKWRDKREKLQLETKRVYTEAKEAVDALFVDSQYDRLQADTNIGMIHAADKLVHRTREAYLSELSVIPGVNAEIFEELEGRIITAISLYDARNVVKNGDFNNGLAFWNVKGHVDVQQSHHRSVLVIPEWEAEVSQEVRVCPGRGYILRVTAYKEGYGEGCVTIHEIENNTDELKFKNCEEEEVYPTDTGTCNDYTAHQGTAACNSRNAGYEDAYEVDTTASVNYKPTYEEETYTDVRRDNHCEYDRGYVNYPPLPAGYVTKELEYFPETDKVWIEIGETEGKFIVGSVELLLMEE

SEQ ID NO: 149 - protein, 1228 aa, Bacillus thuringiensis
MTSNRKNENEIINALSIPAVSNHSTQMDLSPDARIEDSLCIAEGNNINPLVSASTVQTGINIAGRILGVLGVPFAGQIASFYSFLVGELWPRGRDQWEIFLEHVEQLINQQITENARNTALARLQGLGDSFRAYQQSLEDWLENRDDARTRSVLYTQYIALELDFLNAMPLFAIRNQEVPLLMVYAQAANLHLLLLRDASLFGSEFGLTSQEIQRYYERQVEQTRDYSDYCVEWYNTGLNSLRGTNAASWVRYNQFRRDLTLGVLDLVALFPSYDTRTYPINTSAQLTREVYTDAIGATGVNMASMNWYNNNAPSFSAIETAVIRSPHLLDFLEQLTIFSTSSRWSATRHMTYWRGHTIQSRPIGGGLNTSTHGSTNTSINPVRLSFFSRDVYWTESYAGVLLWGIYLEPIHGVPTVRFNFRNPQNTFERGTANYSQPYESPGLQLKDSETELPPETTERPNYESYSHRLSHIGLISQSRVHVPVYSWTHRSADRTNTISSDSITQIPLVKSFNLNSGTSVVSGPGFTGGDIIRTNVNGSVLSMGLNFNNTSLQRYRVRVRYAASQTMVLRVTVGGSTTFDQGFPSTMSANESLTSQSFRFAEFPVGISASGSQTAGISISNNAGRQTFHFDKIEFIPITATFEAEYDLERAQEAVNALFTNTNPRRLKTDVTDYHIDQVSNLVACLSDEFCLDEKRELLEKVKYAKRLSDERNLLQDPNFTSINKQPDFISTNEQSNFTSIHEQSEHGWWGSENITIQEGNDVFKENYVTLPGTFNECYPTYLYQKIGESELKAYTRYQLRGYIEDSQDLEIYLIRYNAKHETLDVPGTESVWPLSVESPIGRCGEPNRCAPHFEWNPDLDCSCRDGEKCAHHSHHFSLDIDIGCTDLHENLGVWVVFKIKTQEGHARLGNLEFIEEKPLLGEALSRVKRAEKKWRDKREKLQLETKRVYTEAKEAVDALFVDSQYNRLQADTNIGMIHAADKLVHRIREAYLSELSVIPGVNAEIFEELEGRIITAISLYDARNVVKNGDFNNGLACWNVKGHVDVQQSHHRSVLVIPEWEAEVSQAVRVCPGRGYILRVTAYKEGYGEGCVTIHEIENNTDELKFKNCEEEEVYPTDTGTCNDYTAHQGTAVCNSRNAGYEDAYEVDTTASVNYKPTYEEETYTDVRRDNHCEYDRGYVNYPPLPAGYMTKELEYFPETDKVWIEIGETEGKFIVDSVELLLMEE

SEQ ID NO: 150 - protein, 1228 aa, Bacillus thuringiensis
MTSNRKNENEIINALSIPAVSNHSTQMDLSPDARIEDSLCIAEGNNINPLVSASTVQTGINIAGRILGVLGVPFAGQIASFYSFLVGELWPRGRDQWEIFLEHVEQLINQQITENARNTALARLQGLGDSFRAYQQSLEDWLENRDDARTRSVLYTQYIALELDFLNAMPLFAIRNQEVPLLMVYAQAANLHLLLLRDASLFGSEFGLTSQEIQRYYERQVEQTRDYSDYCVEWYNTGLNSLRGTNAASWVRYNQFRRDLTLGVLDLVALFPSYDTRTYPINTSAQLTREVYTDAIGATGVNMASMNWYNNNAPSFSAIETAVIRSPHLLDFLEQLTIFSTSSRWSATRHMTYWRGHTIQSRPIGGGLNTSTHGSTNTSINPVRLSFFSRDVYWTESYAGVLLWGIYLEPIHGVPTVRFNFRNPQNTFERGTANYSQPYESPGLQLKDSETELPPETTERPNYESYSHRLSHIGLISQSRVHVPVYSWTHRSADRTNTISSDSITQIPLVKSFNLNSGTSVVSGPGFTGGDIIRTNVNGSVLSMGLNFNNTSLQRYRVRVRYAASQTMVLRVTVGGSTTFDQGFPSTMSANESLTSQSFRFAEFPVGISASGSQTAGISISNNAGRQTFHFDKIEFIPITATFEAEYDLERAQEAVNALFTNTNPRRLKTDVTDYHIDQVSNLVACLSDEFCLDEKRELLEKVKYAKRLSDERNLLQDPNFTSINKQPDFISTNEQSNFTSIHEQSEHGWWGSENITIQEGNDVFKENYVTLPGTFNECYPTYLYQKIGESELKAYTRYQLRGYIEDSQDLEIYLIRYNAKHETLDVPGTESVWPLSVESPIGRCGEPNRCAPHFEWNPDLDCSCRDGEKCAHHSHHFSLDIDIGCTDLHENLGVWVVFKIKTQEGHARLGNLEFIEEKPLLGEALSRVKRAEKKWRDKREKLQLETKRVYTEAKEAVDALFVDSQYNRLQADTNIGMIHAADKLVHRIREAYLSELSVIPGVNAEIFEELEGRIITAISLYDARNVVKNGDFNNGLACWNVKGHVDVQQSHHRSVLVIPEWEAEVSQAVRVCPGRGYILRVTAYKEGYGEGCVTIHEIENNTDELKFKNCEEEEVYPTDTGTCNDYTAHQGTAACNSRNAGYEDAYEVDTTASVNYKPTYEEETYTDVRRDNHCEYDRGYVNYPPLPAGYVTKELEYFPETDKVWIEIGETEGTFIVDSIELLLMEE

SEQ ID NO: 151 - protein, 1235 aa, Bacillus thuringiensis
MNSNRKNENEIIDASFIPAVSNESVTISKEYAQTNQLQNNSIEDGLCIAEGEYIDPFVSASTVQTGISIAGRILGVLGVPFAGQLASFYSFIVGELWPKGRDQWEIFMEHVEQLVRQQITANARNTALARLQGLGDSFRAYQQSLEDWLENRNDARTRSVLYTQYIALELDFLNAMPLFAIREQEVPLLMVYAQAANLHLLLLRDASLYGREFGLTSQEIQRYYERQVERTRDYSDHCVQWYNTGLNNLRGTNAESWVRYNQFRRDLTLGVLDLVALFPSYDTRTYPINTSAQLTREVYTDAIGATGVNMASMNWYNNNAPSFSAIETAVIRSPHLLDFLEQLKIFSASSRWSNTRHMTYWRGHTIQSRPIRGALITSTHGNTNTSINPVTFQFPSRDVYRTESYAGVLLWGIYLEPIHGVPTVRFNFRNPQNTFERGTANYSQPYESPGLQLKDSETELPPETTERPNYESYSHRLSHIGIILQTRLNVPVYSWTHRSADRTNTISSDSITQIPLVKSFNLNSGTSVVSGPGFTGGDIIRTNVNGSVLSMGLNFNNTSLQRYRVRVRYAASQTMVLRVTVGGSTTFDQGFPSTMSANESLTSQSFRFAEFPVGISASGSQTAGISISNNAGRQTFHFDKIEFIPITATFEAEYDLERAQEAVNALFTNTNPRRLKTGVTDYHIDEVSNLVACLSDEFCLDEKRELLEKVKYAKRLSDERNLLQDPNFTSINKQPDFISTNEQSNFTSIHEQSEHGWWGSENITIQEGNDVFKENYVTLPGTYNECYPTYLYQKIGESELKAYTRYQLRGYIEDSQDLEIYLIRYNAKHETLDVPGTESVWPLSVESPIRRCGEPNRCAPHFEWNPDLDCSCRDGEKCAHHSHHFSLDIDVGCIDLHENLGVWVVFKIKTQEGHARLGNLEFIEEKPLLGEALSRVKRAEKKWRDKREKLQLETKRVYTEAKEAVDALFVDSQYDRLQADTNIGMIHAADKLVHRIREAYLSELSVIPGVNAEIFEELEGRIITAISLYDARNVVKNGDFNNGLACWNVKGHVDVQQSHHRSVLVIPEWEAEVSQAVRVCPGRGYILRVTAYKEGYGEGCVTIHEIENNTDELKFKNCEEEEVYPTDTGTCNDYTAHQGTAACNSRNAGYEDAYEVDTTASVNYKPTYEEETYTDVRRDNHCEYDRGYVNYPPLPAGYVTKELEYFPETDKVWIEIGETEGTFIVDSIELLLMEE

SEQ ID NO: 152 - protein, 1256 aa, Bacillus thuringiensis PS46L
MTSNRKNENEIINALSIPTVSNPSTQMNLSPDARIEDSLCVAEVNNIDPFVSASTVQTGINIAGRILGVLGVPFAGQLASFYSFLVGELWPSGRDPWEIFLEHVEQLIRQQVTENTRNTAIARLEGLGRGYRSYQQALETWLDNRNDARSRSIILERYVALELDITTAIPLFRIRNQEVPLLMVYAQAANLHLLLLRDASLFGSEWGTASSDVNQYYQEQIRYTEEYSNHCVQWYNTGLNNLRGTNAESWVRYNQFRRDLTLGVLDLVALFPSYDTRTYPINTSAQLTREVYTDAIGTVHPSQAFASTTWFNNNAPSFSAIEAAVIRPPHLLDFPEQLTIYSTLSRWSNTQFMNIWAGHRLESRPIAGSLNTSTQGSTNTSINPVTLQFTSRDIYRTESLAGLNIFITQPVNGVPWVRFNWRNPLNSLRGSLLYTIGYTGVGTQLQDSETELPPETTERPNYESYSHRLSHIGLISSSHVRALVYSWTHRSADRTNTIGPNRITQIPAVKGRFLFNGSVISGPGFTGGDVVRLNRNNGNIQNRGYIEVPIQFTSTSTRYRVRVRYASVTSIELNVNWGNSSIFTNTLPATAASLDNLQSGDFGYVEINNAFTSATGNIVGVRNFSANAEVIIDRFEFIPVTATFEAKYDLERAQKAVNALFTSTNPRRLKTDVTDYHIDQVSNLVVCLSDEFCLDEKRELFEKVKYAKRLSDERNLLQDPNFTFINGQPSFASIDGQSNFTSINELSNHGWWGSANVTIQEGNDVFKENYVTLPGTFNECYPNYLYQKIGESELKAYTRYQLRGYIEDSQDLEIYLIRYNAKHETLNVPGTESLWPLSVESPIGRCGEPNRCAPHFGWNPDLDCSCRDREKCAHHSHHFTLDIDVGCTDLQEDLGVWVVFKIKTQEGYARLGNLEFIEEKPLIGEALSRVKRAEKKWRDKREKLQVETKRVYIDAKEAVDALFVDSQYDRLQADTNIGMIHAADRLVHRIHEAYLPELPFIPGINVVIFEELENRISTAFSLYDARNVIKNGDFNNGLTCWNVKGHVEVQQLNNHRSVLVIPEWEAEVSQKVRVCPGRGYILRVTAYKEGYGEGCVTIHEVDNNTDQLKFSNCEKGQVYPGNTIACNDYNKNHGANACSSRNRGYDEFYGNTPADYSANQKEYGGAYTSHNHAYGESYESNSSIPADYAPVYEEEAYTHGRRGNSCEYNRGYTPLPAGYVTAELEYFPETDTVWVEIGETEGTFIVDNVELLLMEE

SEQ ID NO: 153 - protein, 1189 aa, Bacillus thuringiensis entomocidus 60.5
MEENNQNQCIPYNCLSNPEEVLLDGERISTGNSSIDISLSLVQFLVSNFVPGGGFLVGLIDFVWGIVGPSQWDAFLVQIEQLINERIAEFARNAAIANLEGLGNNFNIYVEAFKEWEEDPNNPETRTRVIDRFRILDGLLERDIPSFRISGFEVPLLSVYAQAANLHLAILRDSVIFGERWGLTTINVNENYNRLIRHIDEYADHCANTYNRGLNNLPKSTYQDWITYNRLRRDLTLTVLDIAAFFPNYDNRRYPIQPVGQLTREVYTDPLINFNPQLQSVAQLPTFNVMESSRIRNPHLFDILNNLTIFTDWFSVGRNFYWGGHRVISSLIGGGNITSPIYGREANQEPPRSFTFNGPVFRTLSNPTLRLLQQPWPAPPFNLRGVEGVEFSTPTNSFTYRGRGTVDSLTELPPEDNSVPPREGYSHRLCHATFVQRSGTPFLTTGVVFSWTDRSATLTNTIDPERINQIPLVKGFRVWGGTSVITGPGFTGGDILRRNTFGDFVSLQVNINSPITQRYRLRFRYASSRDARVIVLTGAASTGVGGQVSVNMPLQKTMEIGENLTSRTFRYTDFSNPFSFRANPDIIGISEQPLFGAGSISSGELYIDKIEIILADATFEAESDLERAQKAVNALFTSSNQIGLKTDVTDYHIDQVSNLVDCLSDEFCLDEKRELSEKVKHAKRLSDERNLLQDPNFRGINRQPDRGWRGSTDITIQGGDDVFKENYVTLPGTVDECYPTYLYQKIDESKLKAYTRYELRGYIEDSQDLEIYLIRYNAKHEIVNVPGTGSLWPLSAQSPIGKCGEPNRCAPHLEWNPDLDCSCRDGEKCAHHSHHFTLDIDVGCTDLNEDLGVWVIFKIKTQDGHARLGNLEFLEEKPLLGEALARVKRAEKKWRDKREKLQLETNIVYKEAKESVDALFVNSQYDRLQVDTNIAMIHAADKRVHRIREAYLPELSVIPGVNAAIFEELEGRIFTAYSLYDARNVIKNGDFNNGLLCWNVKGHVDVEEQNNHRSVLVIPEWEAEVSQEVRVCPGRGYILRVTAYKEGYGEGCVTIHEIEDNTDELKFSNCVEEEVYPNNTVTCNNYTGTQEEYEGTYTSRNQGYDEAYGNNPSVPADYASVYEEKSYTDGRRENPCESNRGYGDYTPLPAGYVTKDLEYFPETDKVWIEIGETEGTFIVDSVELLLMEE

SEQ ID NO: 154 - protein, 181 aa, Bacillus thuringiensis E05-20a
LTVLDIAAFFPNYDNRRYPIQPVGQLTREVYTDPLINFNPQLQSVAQLPTFNVMESSAIRNPHLFDILNNLTIFTDWFSVGRNFYWGGHRVISSLIGGGNITSPIYGREANQEPPRSFTFNGPVFRTLSNPTLRLLQQPWPAPPFNLRGVEGVEFSTPTNSFTYRGRGTVDSLTELPPEDN

SEQ ID NO: 155 - protein, 1044 aa, Bacillus thuringiensis C-33
MEENNQNQCIPYNCLSNPEEVLLDGERISTGNSSIDISLSLVQFLVSNFVPGGGFLVGLIDFVWGIVGPSQWDAFLVQIEQLINERIAEFARNAAIANLEGLGNNFNIYVEAFKEWEEDPNNPATRTRVIDRFRILDGLLERDIPSFRISGFEVPLLSVYAQAANLHLAILRDSVIFGERWGLTTINVNENYNRLIRHIDEYADHCANTYNRGLNNLPKSTYQDWITYNRLRRDLTLTVLDIAAFFPNYDNRRYPIQPVGQLTREVYTDPLINFNPQLQSVAQLPTFNVMESSAIRNPHLFDILNNLTIFTDWFSVGRNFYWGGHRVISSLIGGGNITSPIYGREANQEPPRSFTFNGPVFRTLSNPTLRLLQQPWPAPPFNLRGVEGVEFSTPTNSFTYRGRGTVDSLTELPPEDNSVPPREGYSHRLCHATFVQRSGTPFLTTGVVFSWTHRSATLTNTIDPERINQIPLVKGFRVWGGTSVITGPGFTGGDILRRNTFGDFVSLQVNINSPITQRYRLRFRYASSRDARVIVLTGAASTGVGGQVSVNMPLQKTMEIGENLTSRTFRYTDFSNPFSFRANPDIIGISEQPLFGAGSISSGELYIDKIEIILADATFEAESDLERAQKAVNALFTSSNQIGLKTDVTDYHIDQVSNLVDCLSDEFCLDEKRELSEKVKHAQRLSDERNLLQDPNFRGINRQPDRGWRGSTDITIQGGDDVFKENYVTLPGTVDECYPTYLYQKIDESKLKAYTRYELRGYIEDSQDLEIYLIRYNAKHEIVNVPGTGSLWPLSAQSPIGKCGEPNRCAPHLEWNPDLDCSCRDGEKCAHHSHHFTLDIDVGCTDLNEDLGVWVIFKIKTQDGHARLGNLEFLEEKPLLGEALARVKRAEKKWRDKREKLQLETNIVYKEAKESVDALFVNSQYDRLQVDTNIAMIHAADKRVHRIREAYLPELSVIPGVNAAIFEELEGRIFTAYSLYDARNVIKNGDFNNGLLCWNVKGHVDVEEQNNHRSVLVIPEWEAEVSQEVRVCPGRGYILRVTAY

SEQ ID NO: 156 - protein, 1191 aa, Bacillus thuringiensis LB-R-78
MENNIQNQCIPYNCLSNPEEVLLDGERISTGNSSIDISLSLVQFLVSNFVPGGGFLVGLIDFVWGIVGPSQWDAFLVQIEQLINERIAEFARNAAIANLEGLGNNFNIYVEAFKEWEEDPNNPATRTRVIDRFRILDGLLERDIPSFRISGFEVPLLSVYAQAANLHLAILRDSVIFGERWGLTTINVNENYNRLIRHIDEYADHCANTYNRGLNNLPKSTYQDWITYNRLRRDLTLTVLDIAAFFPNYDNRRYPIQPVGQLTREVYTDPLINFNPQLQSVAQLPTFNVMESSAIRNPHLFDILNNLTIFTDWFSVGRNFYWGGHRVISSLIGGGNITSPIYGREANQEPPRSFTFNGPVFRTLSNPTLRLLQQPWPAPPFNLRGVEGVEFSTPTNSFTYRGRGTVDSLTELPPEDNSVPPREGYSHRLCHATFVQRSGTPFLTTGVVFSWTHRSATLTNTIDPERINQIPLVKGFRVWGGTSVITGPGFTGGDILRRNTFGDFVSLQVNINSPITQRYRLRFRYASSRDARVIVLTGAASTGVGGQVSVNMPLQKTMEIGENLTSRTFRYTDFSNPFSFRANPDIIGISEQPLFGAGSISSGELYIDKIEIILADATFEAESDLERAQKVDAVNALFTSSNQIGLKTDVTDYHIDQVSNLVDCLSDEFCLDEKRELSEKVKHAKRLSDERNLLQDPNFRGINRQPDRGWRGSTDITIQGGDDVFKENYVTLPGTVDECYPTYLYQKIDESKLKAYTRYELRGYIEDSQDLEIYLIRYNAKHEIVNVPGTGSLWPLSAQSPIGKCGEPNRCAPHLEWNPDLDCSCRDGEKCAHHSHHFTLDIDVGCTDLNEDLGVWVIFKIKTQDGHARLGNLEFLEEKPLLGGALARVKRAEKKWRDKREKLQLETNIVYKEAKESVDALFVNSQYDRLQVDTNIAMIHAADKRVHRIREAYLPELSVIPGVNAAIFEELEGRIFTAYSLYDARNVIKNGDFNNGLLCWNVKGHVDVEEQNNHRSVLVIPEWEAEVSQEVRVCPGRGYILRVTAYKEGYGEGCVTIHEIEDNTDELKFSNCVEEEVYPNNTVTCNNYTGTQEEYEGTYTSRNQGYDEAYGNNPSVPADYASVYEEKSYTDGRRENPCESNRGYGDYTPLPAGYVTKDLEYFPETDKVWIEIGETEGTFIVDSVELLLMEE

SEQ ID NO: 157 - protein, 823 aa, Bacillus thuringiensis aizawai 7.29
MEENNQNQCIPYNCLSNPEEVLLDGERISTGNSSIDISLSLVQFLVSNFVPGGGFLVGLIDFVWGIVGPSQWDAFLVQIEQLINERIAEFARNAAIANLEGLGNNFNIYVEAFKEWEEDPNNPATRTRVIDRFRILDGLLERDIPSFRISGFEVPLLSVYAQAANLHLAILRDSVIFGERWGLTTINVNENYNRLIRHIDEYADHCANTYNRGLNNLPKSTYQDWITYNRLRRDLTLTVLDIAAFFPNYDNRRYPIQPVGQLTREVYTDPLINFNPQLQSVAQLPTFNVMESSAIRNPHLFDILNNLTIFTDWFSVGRNFYWGGHRVISSLIGGGNITSPIYGREANQEPPRSFTFNGPVFRTLSIPTLRLLQQPCQRHHFNLRGGEGVEFSTPTNSFTYRGRGTVDSLTELPPEDNSVPPREGYSHRLCHATFVQRSGTPFLTTGVVFSWTHRSATLTNTIDPERINQIPLVKGFRVWGGTSVITGPGFTGGDILRRNTFGDFVSLQVNINSPITQRYRLRFRYASSRDARVIVLTGAASTGVGGQVSVNMPLQKTMEIGENLTSRTFRYTDFSNPFSFRANPDIIGISEQPLFGAGSISSGELYIDKIEIILADATFEAESDLERAQKAVNALFTSSNQIGLKTDVTDYHIDQVSNLVDCLSDEFCLDEKRELSEKVKHAKRLSDERNLLQDPNFRGINRQPDRGWRGSTDITIQGGDDVFKENYVTLPGTVDECYPTYLYQKIDESKLKAYTRYELRGYIEDSQDLEIYLIAYNAKHEIVNVPGTGSLWPLSAQSPIGKCGEPNRCAPHLEWNPDLDCSC

SEQ ID NO: 158 - protein, 1189 aa, Bacillus thuringiensis aizawai PS81I
MEENNQNQCIPYNCLSNPEEVLLDGERISTGNSSIDISLSLVQFLVSNFVPGGGFLVGLIDFVWGIVGPSQWDAFLVQIEQLINERIAEFARNAAIANLEGLGNNFNIYVEAFKEWEEDPNNPATRTRVIDRFRILDGLLERDIPSFRISGFEVPLLSVYAQAANLHLAILRDSVIFGERWGLTTINVNENYNRLIRHIDEYADHCANTYNRGLNNLPKSTYQDWITYNRLRRDLTLTVLDIAAFFPNYDNRRYPIQPVGQLTREVYTDPLINFNPQLQSVAQLPTFNVMESSAIRNPHLFDILNNLTIFTDWFSVGRNFYWGGHRVISSLIGGGNITSPIYGREANQEPPRSFTFNGPVFRTLSNPTLRLLQQPWPAPPFNLRGVEGVEFSTPTNSFTYRGRGQVDSLTELPPEDNSVPPREGYSHRLCHATFVQRSGTPFLTTGVVFSWTHRSATLTNTIDPERINQIPLVKGFRVWGGTSVITGPGFTGGDILRRNTFGDFVSLQVNINSPITQRYRLRFRYASSRDARVIVLTGAASTGVGGQVSVNMPLQKTMEIGENLTSRTFRYTDFSNPFSFRANPDIIGISEQPLFGAGSISSGELYIDKIEIILADATFEAESDLERAQKAVNALFTSSNQIGLKTDVTDYHIDQVSNLVDCLSDEFCLDEKRELSEKVKHAKRLSDERNLLQDPNFRGINRQPDRGWRGSTDITIQGGDDVFKENYVTLPGTVDECYPTYLYQKIDESKLKAYTRYELRGYIEDSQDLEIYLIRYNAKHEIVNVPGTGSLWPLSAQSPIGKCGEPNRCAPHLEWNPDLDCSCRDGEKCAHHSHHFTLDIDVGCTDLNEDLGLWVIFKIKTQDNHARLGNLEFLEEKPLLGEALARVKRAEKKWRDKREKLQLETNIVYKEAKESVDALFVNSQYDRLQVNTNIAMIHAADKRVHRIREAYLPELSVIPGVNAAIFEELEGRIFTAYSLYDARNVIKNGDFNNGLLCWNVKGHVDVEEQNNHRSVLVIPEWEAEVSQEVRVCPGRGYILRVTAYKEGYGEGCVTIHEIEDNTDELKFSNCVEEEVYPNNTVTCNNYTGTQEEYEGTYTSRNQGYDEAYGNNPSVPADYASVYEEKSYTDGRRENPCESNRGYGDYTPLPAGYVTKDLEYFPETDKVWIEIGETEGTFIVDSVELLLMEE

SEQ ID NO: 159 - protein, 1189 aa, Bacillus thuringiensis entomocidus HD110
MEENNQNQCIPYNCLSNPEEVLLDGERISTGNSSIDISLSLVQFLVSNFVPGGGFLVGLIDFVWGIVGPSQWDAFLVQIEQLINERIAEFARNAAIANLEGLGNNFNIYVEAFKEWEEDPNNPETRTRVIDRFRILDGLLERDIPSFRISGFEVPLLSVYAQAANLHLAILRDSVIFGERWGLTTINVNENYNRLIRHIDEYADHCANTYNRGLNNLPKSTYQDWITYNRLRRDLTLTVLDIAAFFPNYDNRRYPIQPVGQLTREVYTDPLINFNPQLQSVAQLPTFNVMESSAIRNPHLFDILNNLTIFTDWFSVGRNFYWGGHRVISSLIGGGNITSPIYGREANQEPPRSFTFNGPVFRTLSNPTLRLLQQPWPAPPFNLRGVEGVEFSTPTNSFTYRGRGTVDSLTELPPEDNSVPPREGYSHRLCHATFVQRSGTPFLTTGVVFSWTHRSATLTNTIDPERINQIPLVKGFRVWGGTSVITGPGFTGGDILRRNTFGDFVSLQVNINSPITQRYRLRFRYASSRDARVIVLTGAASTGVGGQVSVNMPLQKTMEIGENLTSRTFRYTDFSNPFSFRANPDIIGISEQPLFGAGSISSGELYIDKIEIILADATFEAESDLERAQKAVNALFTSSNQIGLKTDVTDYHIDQVSNLVDCLSDEFCLDEKRELSEKVKHAKRLSDERNLLQDPNFRGINRQPDRGWRGSTDITIQGGDDVFKENYVTLPGTVDECYPTYLYQKIDESKLKAYTRYELRGYIEDSQDLEIYLIRYNAKHEIVNVPGTGSLWPLSAQSPIGKCGEPNRCAPHLEWNPDLDCSCRDGEKCAHHSHHFTLDIDVGCTDLNEDLGVWVIFKIKTQDGHARLGNLEFLEEKPLLGEALARVKRAEKKWRDKREKLQLETNIVYKEAKESVDALFVNSQYDRLQVDTNIAMIHAADKRVHRIREAYLPELSVIPGVNAAIFEELEGRIFTAYSLYDARNVIKNGDFNNGLLCWNVKGHVDVEEQNNHRSVLVIPEWEAEVSQEVRVCPGRGYILRVTAYKEGYGEGCVTIHEIEDNTDELKFSNCVEEEVYPNNTVTCNNYTGTQEEYEGTYTSRNQGYDEAYGNNPSVPADYASVYEEKSYTDGRRENPCESNRGYGDYTPLPAGYVTKDLEYFPETDKVWIEIGETEGTFIVDSVELLLMEE

SEQ ID NO: 160 - protein, 756 aa, Bacillus thuringiensis aizawai 7.29
MEENNQNQCIPYNCLSNPEEVLLDGERISTGNSSIDISLSLVQFLVSNFVPGGGFLVGLIDFVWGIVGPSQWDAFLVQIEQLINERIAEFARNAAIANLEGLGNNFNIYVEAFKEWEEDPNNPATRTRVIDRFRILDGLLERDIPSFRISGFEVPLLSVYAQAANLHLAILRDSVIFGERWGLTTINVNENYNRLIRHIDEYADHCANTYNRGLNNLPKSTYQDWITYNRLRRDLTLTVLDIAAFFPNYDNRRYPIQPVGQLTREVYTDPLINFNPQLQSVAQLPTFNVMESSAIRNPHLFDILNNLTIFTDWFSVGRNFYWGGHRVISSLIGGGNITSPIYGREANQEPPRSFTFNGPVFRTLSNPTLRLLQQPWPAPPFNLRGVEGVEFSTPTNSFTYRGRGTVDSLTELPPEDNSVPPREGYSHRLCHATFVQRSGTPFLTTGVVFSWTHRSATLTNTIDPERINQIPLVKGFRVWGGTSVITGPGFTGGDILRRNTFGDFVSLQVNINSPITQRYRLRFRYASSRDARVIVLTGAASTGVGGQVSVNMPLQKTMEIGENLTSRTFRYTDFSNPFSFRANPDIIGISEQPLFGAGSISSGELYIDKIEIILADATFEAESDLERAQKAVNALFTSSNQIGLKTDVTDYHIDQVSNLVDCLSDEFCLDEKRELSEKVKHAKRLSDERNLLQDPNFRGINRQPDRGWRGSTDITIQGGDDVFKENYVTLPGTVDECYPTYLYQKIDESKLKAYTR

SEQ ID NO: 161 - protein, 1189 aa, Bacillus thuringiensis AF-2
MEENNQNQCIPYNCLSNPEEVLLDGERISTGNSSIDISLSLVQFLVSNFVPGGGFLVGLIDFVWGIVGPSQWDAFLVQIEQLINERIAEFARNAAIANLEGLGNNFNIYVEAFKEWEEDPNNPATRTRVIDRFRILDGLLERDIPSFRISGFEVPLLSVYAQAANLHLAILRDSVIFGERWGVTTINVNENYNRLIRHIDEYADHCANTYNRGLNNLPKSTYQDWITYNRLRRDLTLTVLDIAAFFPNYDNRRYPIQPVGQLTREVYTDPLINFNPQLQSVAQLPTFNVMESSAIRNPHLFDILNNLTIFTDWFSVGRNFYWGGHRVISSLIGGGNITSPIYGREANQEPPRSFTFNGPVFRTLSNPTLRLLQQPWPAPPFNLRGVEGVEFSTPTNSFTYRGRGTVDSLTELPPEDNSVPPREGYSHRLCHATFVQRSGTPFLTTGVVFSWTHRSATLTNTIDPERINQIPLVKGFRVWGGTSVITGPGFTGGDILRRNTFGDFVSLQVNINSPITQRYRLRFRYASSRDARVIVLTGAASTGVGGQVSVNMPLQKTMEIGENLTSRTFRYTDFSNPFSFRANPDIIGISERPLFGAGSISSGELYIDKIEIILADATFEAESDLERAQKAVNALFTSSNQIGLKTDVTDYHIDQVSNLVDCLSDEFCLDEKRELSEKVKHAKRLSDERNLLQDPNFRGINRQPDRGWRGSTDITIQGGDDVFKENYVTLPGTVDECYPTYLYQKIDESKLKAYTRYELRGYIEDSQDLEIYLIRYNAKHEIVNVPGTGSLWPLSAQSPIGKCGEPNRCAPHLEWNPDLDCSCRDGEKCAHHSHHFTLDIDVGCTDLNEDLGVWVIFKIKTQDGHARLGNLEFLEEKPLLGEALARVKRAEKKWRDKREKLQLETNIVYKEAKESVDALFVNSQYDRLQVDTNIAMIHAADKRVHRIREAYLPELSVIPGVNAAIFEELEGRIFTAYSLYDARNVIKNGDFNNGLLCWNVKGHVDVEEQNNHRSVLVIPEWEAEVSQEVRVCPGRGYILRVTAYKEGYGEGCVTIHEIEDNTDELKFSNCVEEEVYPNNTVTCNNYTGTQEEYEGTYSSRNQGYDEAFGNNPSVPADYASVYEEKSYTDGRRENPCESNRGYGDYTPLPAGYVTKDLEYFPETDKVWIEIGETEGTFIVDSVELVLMEE

SEQ ID NO: 162 - protein, 1189 aa, Bacillus thuringiensis J8
MEENNQNQCIPYNCLSNPEEVLLDGERISTGNSSIDISLSLVQFLVSNFVPGGGFLVGLIDFVWGIVGPSQWDAFLVQIEQLINERIAEFARNAAIANLEGLGNNFNIYVEAFKEWEEDPNNPATRTRVIDRFRILDGLLERDIPSFRISGFEVPLLSVYAQAANLHLAILRDSVIFGERWGLTTINVNENYNRLIRHIDEYADHCANTYNRGLNNLPKSTYQDWITYNRLRRDLTLTVLDIAAFFPNYDNRRYPIQPVGQLTREVYTDPLINFNPQLQSVAQLPTFNVMESSAIRNPHLFDILNNLTIFTDWFSVGRNFYWGGHRVISSLIGGGNITSPIYGREANQEPPRSFTFNGPVFRTLSNPTLRLLQQPWPAPPFNLRGVEGVEFSTPTNSFTYRGRGTVDSLTELPPEDNSVPPREGYSHRLCHATFVQRSGTPFLTTGVVFSWTHRSATLTNTIDPERINQIPLVKGFRVWGGTSVITGPGFTGGDILRRNTFGDFVSLQVNINSPITQRYRLRFRYASSRDARVIVLTGAASTGVGGQVSVNMPLQKTMEIGENLTSRTFRYTDFSNPFSFRANPDIIGISEQPLFGAGSISSGELYIDKIEIILADATFEAESDLERAQKAVNALFTSSNQIGLKTDVTDYHIDQVSNLVDCLSDEFCLDEKRELSEKVKHAKRLSDERNLLQDPNFRGINRQPDRGWRGSTDITIQGGDDVFKENYVTLPGTVDECYPTYLYQKIDESKLKAYTRYELRGYIEDSQDLEIYLIRYNAKHEIVNVPGTGSLWPLSAQSPIGKCGEPNRCAPHLEWNPDLDCSCRDGEKCAHHSHHFTLDIDVGCTDLNEDLGVWVIFKIKTQDGHARLGNLEFLEEKPLLGEALARVKRAEKKWRDKREKLQLETNIVYKEAKESVDALFVNSQYDRLQVDTNIAMIHAADKRVHRIREAYLPELSVIPGVNAAIFEELEGRIFTAYSLYDARNVIKNGDFNNGLLCWNVKGHVDVEEQNNHRSVLVIPEWEAEVSQEVRVCPGRGYILRVTAYKEGYGEGCVTIHEIEDNTDELKFSNCVEEEVYPNNTVTCNNYTGTQEEYEGTYTSRNQGYDEAYGNNPSVPADYASVYEEKSYTDGRRENPCESNRGYGDYTPLPAGYVTKDLEYFPETDKVWIEIGETEGTFIVDSVELLLMEE

SEQ ID NO: 163 - protein, 1189 aa, Bacillus thuringiensis c002; identical to SEQ ID NO: 162

SEQ ID NO: 164 - protein, 1189 aa, Bacillus thuringiensis G10-01A; identical to SEQ ID NO: 162

SEQ ID NO: 165 - protein, 1176 aa, Bacillus thuringiensis c001
MENNIQNQCVPYNCLSNPEEILLDGERISTGNSSIDISLSLVQLLVSNFVPGGGFLVGLLDFVWGIVGPSPWDAFLVQIEQLINERIAAYARSAAISNLEGLGNNFNIYVEAFKEWEADPDNPVTRTRVVDRFRILDGLLERDIPSFRIAGFEVPLLSVYAQAANLHLAILRDSSIFGARWGLTTINVNENYNRLIRHIDEYANHCADTYNRGLNNLPKSTYQDWITYNRLRRDLTLTVLDIAAFFPSYDNRRYPIQSVGQLTREIYTDPLITFNPQLQSVAQLPTFNVMESNAIRTPHLFDVLNNLTIFTDWFSVGRNFYWGGHRVISNRIGGGNITSPIYGREANQEPPRSFTFNGPVFRTLSNPTFRPLQQPWPAPPFNLRGVEGVEFSTPLNSFTYRGRGTVDSLTELPPEDNSVPPREGYSHRLCHATFVQRSGTPFLTTGPVFSWTHRSATDRNIIYPDVINQIPLVKAFNLTSGTSVVRGPGFTGGDIIRTNVNGSVLSMSLNFSNTTLQRYRVRVRYAASQTMVMSVTVGGSTTGNQGFPSTMSANGALTSQSFRFAEFPVGISASGSQGASISISNNVGRQMFHLDRIEFLPVTSTFEEEYDLERAQEAVNALFTSTNQLGLKTDVTDYHIDQVSNLVECLSDEFCLDEKRELSEKVKHAKRLSDERNLLQDRNFRSINGQLDRGWRGSTDITIQGGDDVFKENYVTLPGTFDECYPTYLYQKIDESKLKSYTRYELRGYIEDSQDLEIYLIRYNAKHEIVNVPGTGSLWPLSIENSIGPCGEPNRCAPHLEWNPNLDCSCRDGEKCAHHSHHFSLDIDVGCTDLNEDLGVWVIFKIKTQDGHARLGNLEFLEEKPLLGEALARVKRAEKKWRDKREKLEWETNIVYKEAKESVDALFVNSQYDRLQADTNIAMIHAADKRVHRIREAYLPELSVIPGVNAGIFEELEGRIFTAYSLYDARNVIKNGDFNNGLLCWNLKGHVDVEEQNNHRSVLVVPEWEAEVSQEVRVCPGRGYILRVTAYKEGYGEGCVTIHEIEDNTDELKFSNCVEEEVYPNNTVTCNDYTATQEEYGGAYTSRNHGYGKSYESNSSVQADYASVYEEKADTDGRRDNHCESNRGYGDYTPLPAGYVTKELEYFPETDKVWVEIGETEGTFIVDSVELLLMEE

SEQ ID NO: 166 - protein, 646 aa, Bacillus thuringiensis 087
MVMSVTVGGSTTGNQGFPSTMSANGALTSQSFRFAEFPVGISASGSQGASISISNNVGRQMFHLDRIEFLPVTSTFEEEYDLERAQEAVNALFTSTNQLGLKTDVTDYHIDQVSNLVECLSDEFCLDEKRELSEKVKHAKRLSDERNLLQDRNFRSINGQLGRGWRGSTDITIQGGDDVFKENYVTLPGTFDECYPTYLYQKIDESKLKSYTRYELRGYIEDSQDLEIYLIRYNAKHEIVNVPGTGSLWPLSIENSIGPCGEPNRCAPHLEWNPNLDCSCRDGEKCAHHSHHFSLDIDVGCTDLNEDLGVWVIFKIKTQDGHARLGNLEFLEEKPLLGEALARVKRAEKKWRDKREKLEWETNIVYKEAKESVDALFVNSQYDRLQADTNIAMIHAADKRVHRIREAYLPELSVIPGVNAGIFEELEGRIFTAYSLYDARNVIKNGDFNNGLLCWNLKGHVDVEEQNNHRSVLVVPEWEAEVSQEVRVCPGRGYILRVTAYKEGYGEGCVTIHEIEDNTDELKFSNCVEEEVYPNNTVTCNDYTATQEEYGGAYTSRNHGYGKSYESNSSVQADYASVYEEKADTDGRRDNHCESNRGYGDYTPLPAGYVTKELEYFPETDKVWVEIGETEGTFIVDSVELLLMEE

SEQ ID NO: 167 - protein, 244 aa, Bacillus thuringiensis TA476-1
TIQGGDDVFKENYVTLPGTFDECYPTYLYQKIDESKLKAYTRYQLRGYIGDSQDLEIYLIRYNAKHEIVNVPGTGSLWTLSVENSIGPCGEPNRCAPHLEWNPNLECSCREGEKCAHHSHHFSLDIDVGCTDLNEDLGVWAIFKIKTQDGHARLGNLEFLEEKPLVGEALARVKRAEKKWRDKREKLELETNIVYKEAKESVDALFVNSQYDRLQADTNIAMIHAADKRVHSIREAYLPELSII

SEQ ID NO: 168 - protein, 1165 aa, Bacillus thuringiensis aizawai HD68
MEINNQNQCVPYNCLSNPKEIILGEERLETGNTVADISLGLINFLYSNFVPGGGFIVGLLELIWGFIGPSQWDIFLAQIEQLISQRIEEFARNQAISRLEGLSNLYKVYVRAFSDWEKDPTNPALREEMRIQFNDMNSALITAIPLFRVQNYEVALLSVYVQAANLHLSILRDVSVFGERWGYDTATINNRYSDLTSLIHVYTNHCVDTYNQGLRRLEGRFLSDWIVYNRFRRQLTISVLDIVAFFPNYDIRTYPIQTATQLTREVYLDLPFINENLSPAASYPTFSAAESAIIRSPHLVDFLNSFTIYTDSLARYAYWGGHLVNSFRTGTTTNLIRSPLYGREGNTERPVTITASPSVPIFRTLSYITGLDNSNPVAGIEGVEFQNTISRSIYRKSGPIDSFSELPPQDASVSPAIGYSHRLCHATFLERISGPRIAGTVFSWTHRSASPTNEVSPSRITQIPWVKAHTLASGASVIKGPGFTGGDILTRNSMGELGTLRVTFTGRLPQSYYIRFRYASVANRSGTFRYSQPPSYGISFPKTMDAGEPLTSRSFAHTTLFTPITFSRAQEEFDLYIQSGVYIDRIEFIPVTATFEAEYDLERAQKVVNALFTSTNQLGLKTDVTDYHIDQVSNLVACLSDEFCLDEKRELSEKVKHAKRLSDERNLLQDPNFRGINRQPDRGWRGSTDITIQGGDDVFKENYVTLPGTFDECYPTYLYQKIDESKLKAYTRYQLRGYIEDSQDLEIYLIRYNAKHEIVNVPGTGSLWPLSVENQIGPCGEPNRCAPHLEWNPDLHCSCRDGEKCAHHSHHFSLDIDVGCTDLNEDLGVWVIFKIKTQDGHARLGNLEFLEEKPLLGEALARVKRAEKKWRDKRETLQLETTIVYKEAKESVDALFVNSQYDRLQADTNIAMIHAADKRVHRIREAYLPELSVIPGVNAAIFEELEERIFTAFSLYDARNIIKNGDFNNGLLCWNVKGHVEVEEQNNHRSVLVIPEWEAEVSQEVRVCPGRGYILRVTAYKEGYGEGCVTIHEIENNTDELKFNNCVEEEVYPNNTVTCINYTATQEEYEGTYTSRNRGYDEAYGNNPSVPADYASVYEEKSYTDRRRENPCESNRGYGDYTPLPAGYVTKELEYFPETDKVWIEIGETEGTFIVDSVELLLMEE

SEQ ID NO: 169 - protein, 1176 aa, Bacillus thuringiensis; identical to SEQ ID NO: 56

SEQ ID NO: 170 - protein, 1160 aa, Bacillus thuringiensis BTS00349A
MDINHQNQCIPYNCLSNPDAILLDAERLETGNTVADISLGLINFLYSNFVPGGGFIVGLLELIWGFVGPSQWEIFLAQIEQLISQRIEEFARNQAISRLEGLSNNYEIYTETFRAWEKDPSNPALREEMRTQFNVMNSALIAAIPLLRVRNYEVALLSVYVQAANLHLSVLRDVSVYGQRWGFDPATVNSRYSDLTRLIHVYTDHCVDTYNDGLKNLEGSRLSDWVVYNRFRRRLTISVLDIIAFFPNYDIEAYPIQTASQLTREVYLDLPFVNETLSPPASYPTFSAAESAIIRSPHLVDFLNSFTIYTDSLASYAYWGGHLVNSFRTGTTTNLIRSPLYGREGNTERPVTISASPSVPIFRTLSYFTGLNNNNPVAGIEGVEFQNTISRSIYRKSGPIDSFSELPPQDVSVSPAIGYSHRLCHATFLERISGPRIAGTVFSWTHRSASPINEVSPSRITQIPWVKAHTLASGASVIKGPGFTGGDILTRNSMGDLGALRVTFTGRLPQSYYIRFRYASVANRSGTFRYSQPPSYGISFPKTMDAGEALTSRSFAHTTLFTPITFSRAQEEFDLYIQSGVYIDRIEFIPVDATFESEINLERAQKAVNALFTSTNQLGLKTDVTDYHIDQVSNLVECLSDEFCLDEKRELSEKVKHAKRLSDERNLLQDPNFRGINRQPDRGWRGSTDITIQGGDDVFKENYVTLTGTFDECYPTYLYQKIDESKLKAYTRYQLRGYIEDSQDLEIYLIRYNAKHEIVNVPGTGSLWPLSVQSPIGKCGEPNRCAPHLEWNPDLDCSCRDEEKCAHHSHHFSLDIDVGCTDLNEDLGVWVIFKIKTQDGHARLGNLEFLEEKPLVGEALARVKRAEKKWRDKREKLELETNIVYKEAKESVDALFVNSQYDQLQADTNIAMIHAADKRVHSIREAYLPELSVIPGVNAGIFEELEGRIFTAYSLYDARNVIKNGDFNNGLSCWNVKGHVDVEEQNNHRSVLVVPEWEAEVSQEVRVCPGRGYILRVTAYKEGYGEGCVTIHEVDNNTDELKFSNCEKEQVYPGNTVACNDYNKNHGANACSSRNRGYDESYESNSSIPADYAPVYEEEAYTDGQRGNPCEFNRGHTPLPAGYVTAELEYFPETDTVWVEIGETEGTFIVDSVELLLMEE

SEQ ID NO: 171 - protein, 1160 aa, Bacillus thuringiensis B-Pr-88
MDINHQNQCIPYNCLSNPDAILLDAERLETGNTVADISLGLINFLYSNFVPGGGFIVGLLELIWGFVGPSQWEIFLAQIEQLISQRIEEFARNQAISRLEGLSNNYEIYTETFRAWEKDPSNPALREEMRTQFNVMNSALIAAIPLLRVRNYEVALLSVYVQAANLHLSVLRDVSVYGQRWGFDPATVNSRYSDLTRLIHVYTDHCVDTYNDGLKNLEGSRLSDWVVYNRFRRRLTISVLDIIAFFPNYDIEAYPIQTASQLTREVYLDLPFVNETLSPPASYPTFSAAESAIIRSPHLVDFLNSFTIYTDSLASYAYWGGHLVNSFRTGTTTNLIRSPLYGREGNTERPVTISASPSVPIFRTLSYFTGLNNNNPVAGIEGVEFQNTISRSIYRKSGPIDSFSELPPQDVSVSPAIGYSHRLCHATFLERISGPRIAGTVFSWTHRSASPINEVSPSRITQIPWVKAHTLASGASVIKGPGFTGGDILTRNSMGDLGALRVTFTGRLPQSYYIRFRYASVANRSGTFRYSQPPSYGISFPKTMDAGEALTSRSFAHTTLFTPITFSRAQEEFDLYIQSGVYIDRIEFIPVDATFESEINLERAQKAVNALFTSTNQLGLKTDVTDYHIDQVSNLVECLSDEFCLDEKRELSEKVKHAKRLSDERNLLQDPNFRGINRQPDRGWRGSTDITIQGGDDVFKENYVTLTGTFDECYPTYLYQKIDESKLKAYTRYQLRGYIEDSQDLEIYLIRYNAKHEIVNVPGTGSLWPLSVQSPIGKCGEPNRCAPHLEWNPDLDCSCRDEEKCAHHSHHFSLDIDVGCTDLNEDLGVWVIFKIKTQDGHARLGNLEFLEEKPLVGEALARVKRAEKKWRDKREKLELETNIVYKEAKESVDALFVNSQYDQLQADTNIAMIHAADKRVHSIREAYLPELSVIPGVNAGIFEELEGRIFTAYSLYDARNVIKNGDFNNGLSCWNVKGHVDVEEQNNHRSVLVVPEWEAEVSQEVRVCPGRGYILRVTAYKEGYGEGCVTIHEVDNNTDELKFSNCEKEQVYPGNTVACNDYNKNHGANACSSRNRGYDESYESNSSIPADYAPVYEEEAYTDGQRGNPSEFNRGHTPLPAGYVTAELEYFPETDTVWVEIGETEGTFIVDSVELLLMEE

SEQ ID NO: 172 - protein, 1173 aa, Bacillus thuringiensis JC291
MEIINNQNQCVPYNCLSNPENEILDIESLSSRSREQVAEISLGLTRFLLESLLPGASFGFALFDIIWGVIGPDQWNLFLAQIEQLIDQRIEAHVRNQAISRLEGLGDSYEVYIESLREWEGSPNNEGLQQDVRNRFSNTDNALITGYLFLREQGFEIPLLSVYVQAANLHLSILRDVSVFGERWGYDTATINNRYSDLTSLIHVYTNHCVDTYNQGLRRLEGRFLTDWIVYNRFRRQFTISVLDIVAFFPNYDIRTYPIHTATQLTREIYLDLPFINENLSPAASYPTFSAAESAIIRSPHLVDFLNSFTIYTDSLARYAYWGGHLVNCFRTGTTTNLIRSPLYGREGNTERPVTITASPSVPIFRTLSYITGLDNSNPVAGIEGVEFQNTISRSIYRKSGPIDSFNELPPQDASVSPSIGYSHRLCHATFLERISGPRIAGVVFPWTHRSASPTNEVSSSRKTQIPWVKAHTLASGASVIKGPGFTGGDILRRTSPGQISTLRVNITAPLSQRYRVRIRYASTTNLQFHTSIDGRPINQGNFSATMSSGSNLQSGSFRTVGFTTPFNFSNGSSVFTLSAHVFNSGNEVYIDRIEFVPAEVTFEAEYDLERAQKAVNELFTSSNQIGLKTDVTDYHIDQVSNLVECLSDEFCLDEKKELSEKVKHAKRLSDERNLLQDPNFRGINRQLDRGWRGSTDITIQGGDDVFKENYVTLPGTFDECYPTYLYQKIDESKLKAYTRYQLRGYIEDSQDLEIYLIRYNAKHEIVNVPGTGSLWPLSVENQIGPCGEPNRCAPHLEWNPDLHCSCRDGENVPIIPIISPWDIDVGCTDLNEDLGVWVIFKIKTQDGHARLGNLEFLEEKPLVGEALARVKRAEKKWRDKREKLELETNIVYKEAKESVDALFVNSQYDRLQADTNIAMIHAADKRVHSIREAYLPELSVIPGVNAAIFEELEGRIFTAFSLYDARNVIKNGDFNNGLSCWNVKGHVDVEEQNNHRSVLVVPEWEAEVSQEVRVCPGRGYILRVTAYKEGYGEGCVTIHEIENNTDELKFNNCVEEEVYPNNTVTCINYTATQEEYEGTYTSRNRGYDEAYGNNPSVPADYASVYEEKSYTDRRRENPCESNRGYGDYTPLPAGYVTKELEYFPETDKVWIEIGETEGTFIVDSVELLLMEE

SEQ ID NO: 173 - protein, 1171 aa, Bacillus thuringiensis kenyae 4F1
MEIVNNQNQCVPYNCLNNPENEILDIERSNSTVATNIALEISRLLASATPIGGILLGLFDAIWGSIGPSQWDLFLEQIELLIDQKIEEFARNQAISRLEGISSLYGIYTEAFREWEADPTNPALKEEMRTQFNDMNSILVTAIPLFSVQNYQVPFLSVYVQAANLHLSVLRDVSVFGQAWGFDIATINSRYNDLTRLIPIYTDYAVRWYNTGLDRLPRTGGLRNWARFNQFRRELTISVLDIISFFRNYDSRLYPIPTSSQLTREVYTDPVINITDYRVGPSFENIENSAIRSPHLMDFLNNLTIDTDLIRGVHYWAGHRVTSHFTGSSQVITTPQYGITANAEPRRTIAPSTFPGLNLFYRTLSNPFFRRSENITPTLGINVVQGVGFIQPNNAEVLYRSRGTVDSLNELPIDGENSLVGYSHRLSHVTLTRSLYNTNITSLPTFVWTHHSATNTNTINPDIITQIPLVKGFRLGGGTSVIKGPGFTGGDILRRNTIGEFVSLQVNINSPITQRYRLRFRYASSRDARITVAIGGQIRVDMTLEKTMEIGESLTSRTFSYTNFSNPFSFRANPDIIRIAEELPIRGGELYIDKIELILADATFEEEYDLERAQKAVNALFTSTNQLGLKTDVTDYHIDQVSNLVECLSDEFCLDEKRELSEKVKHAKRLSDERNLLQDPNFRGINRQPDRGWRGSTDITIQGGDDVFKENYVTLPGTFDECYPTYLYQKIDESKLKAYTRYELRGYIEDSQDLEIYLIRYNAKHETVNVPGTGSLWPLSAQSPIGKCGEPNRCAPHLEWNPNLDCSCRDGEKCAHHSHHFSLDIDVGCTDLNEDLGVWVIFKIKTQDGYARLGNLEFLEENPLLGEALARVKRAEKKWRDKCEKLEWETNIVYKEAKESVDALFVNSQYDRLQADTNIAMIHAADKRVHSIREAYLPELSVIPGVNAAIFEELEGRIFTAFSLYDARNVIKNGDFNNGLSCWNVKGHVDVEEQNNHRSVLVVPEWEAEVSQEVRVCPGRGYILRVTAYKEGYGEGCVTIHEIEDNTDELKFSNCVEEEVYPNNTVTCNNYTATQEEHEGTYTSRNRGYDEAYESNSSVHASVYEEKSYTDRRRENPCESNRGYGDYTPLPAGYVTKELEYFPETDKVWIEIGETEGTFIVDSVELLLMEE

SEQ ID NO: 174 - protein, 1171 aa, Bacillus thuringiensis BR64
MEIVNNQNQCVPYNCLNNPENEILDIERSNSTVATNIALEISRLLASATPIGGILLGLFDAIWGSIGPSQWDLFLEQIELLIDQKIEEFARNQAISRLEGISSLYGIYTEAFREWEADPTNPALKEEMRTQFNDMNSILVTAIPLFSVQNYQVPFLSVYVQAANLHLSVLRDVSVFGQAWGFDIATINSRYNDLTRLIPIYTDYAVRWYNTGLDRLPRTGGLRNWARFNQFRRELTISVLDIISFFRNYDSRLYPIPTSSQLTREVYTDPVINITDYRVGPSFENIENSAIRSPHLMDFLNNLTIDTDLIRGVHYWAGHRVTSHFTGSSQVITTPQYGITANAEPRRTIAPSTFPGLNLFYRTLSNPFFRRSENITPTLGINVVQGVGFIQPNNAEVLYRSRGTVDSLNELPIDGENSLVGYSHRLSHVTLTRSLYNTNITSLPTFVWTHHSATNTNTINPDIITQIPLVKGFRLGGGTSVIKGPGFTGGDILRRNTIGEFVSLQVNINSPITQRYRLRFRYASSRDARITVAIGGQIRVDMTLEKTMEIGESLTSRTFSYTNFSNPFSFRANPDIIRIAEELPIRGGELYIDKIELILADATFEEEYDLERAQKAVNALFTSTNQLGLKTDVTDYHIDQVSNLVECLSDEFCLDEKRELSEKVKHAKRLSDERNLLQDPNFRGINRQPDRGWRGSTDITIQGGDDVFKENYVTLPGTFDECYPTYLYQKIDESKLKAYTRYELRGYIEDSQDLEIYLIRYNAKHETVNVPGTGSLWPLSAQSPIGKCGEPNRCAPHLEWNPNLDCSCRDGEKCAHHSHHFSLDIDVGCTDLNEDLGVWVIFKIKTQDGYARLGNLEFLEEKPLLGEALARVKRAEKKWRDKCEKLEWETNIVYKEAKESVDALFVNSQYDRLQADTNIAMIHAADKRVHSIREAYLPELSVIPGVNAAIFEELEGRIFTAFSLYDARNVIKNGDFNNGLSCWNVKGHVDVEEQNNHRSVLVVPEWEAEVSQEVRVCPGRGYILRVTAYKEGYGEGCVAIHEIEDNTDELKFSNCVEEEVYPNNTVTCNNYTATQEEHEGTYTSRNRGYDEAYESNSSVHASVYEEKSYTDRRRENPCESNRGYGDYTPLPAGYVTKELEYLPETDKVWIEIGETEGTFIVDSVELLLMEE

SEQ ID NO: 175 - protein, 1171 aa, Bacillus thuringiensis kenyae; identical to SEQ ID NO: 173

SEQ ID NO: 176 - protein, 1171 aa, Bacillus thuringiensis kenyae PS81F
MEIVNNQNQCVPYNCLNNPENEILDIERSNSTVATNIALEISRLLASATPIGGILLGLFDAIWGSIGPSQWDLFLEQIELLIDQKIEEFARNQAISRLEGISSLYGIYTEAFREWEADPTNPALKEEMRTQFNDMNSILVTAIPLFSVQNYQVPFLSVYVQAANLHLSVLRDVSVFGQAWGFDIATINSRYNDLTRLIPIYTDYAVRWYNTGLDRLPRTGGLRNWARFNQFRRELTISVLDIISFFRNYDSRLYPIPTSSQLTREVYTDPVINITDYRVGPSFENIENSAIRSPHLMDFLNNLTIDTDLIRGVHYWAGHRVTSHFTGSSQVITTPQYGITANAEPRRTIAPSTFPGLNLFYRTLSNPFFRRSENITPTLGINVVQGVGFIQPNNAEVLYRSRGTVDSLNELPIDGENSLVGYSHRLSHVTLTRSLYNTNITSLPTFVWTHHSATNTNTINPDIITQIPLVKGFRLGGGTSVIKGPGFTGGDILRRNTIGEFVSLQVNINSPITQRYRLRFRYASSRDARITVAIGGQIRVDMTLEKTMEIGESLTSRTFSYTNFSNPFSFRANPDIIRIAEELPIRGGELYIDKIELILADATFEEEYDLERAQKAVNALFTSTNQLGLKTDVTDYHIDQVSNLVECLSDEFCLDEKRELSEKVKHAKRLSDERNLLQDPNFRGINRQPDRGWRGSTDITIQGGDDVFKENYVTLPGTFDECYPTYLYQKIDESKLKAYTRYELRGYIEDSQDLEIYLIRYNAKHETVNVPGTGSLWPLSAQSPIGKCGEPNRCAPHLEWNPNLDCSCRDGEKCAHHSHHFSLDIDVGCTDLNEDLGVWVIFKIKTQDGYARLGNLEFLEEKPLLGEALARVKRAEKKWRDKCEKLEWETNIVYKEAKESVDALFVNSQYDRLQADTNIAMIHAADKRVHSIREAYLPELSVIPGVNAAIFEELEGRIFTAFSLYDARNVIKNGDFNNGLSCWNVKGHVDVEEQNNHRSVLVVPEWEAEVSQEVRVCPGRGYILRVTAYKEGYGEGCVTIHEIEDNTDELKFSNCVEEEVYPNNTVTCNNYTATQEEHEGTYTSRNRGYDEAYESNSSVHASVYEEKSYTDRRRENPCESNRGYGDYTPLPAGYVTKELEYFPETDKVWIEIGETEGTFIVDSVELLLMEE

SEQ ID NO: 177 - protein, 1171 aa, Bacillus thuringiensis kenyae LBIT-147
MEIVNNQNQCVPYNCLNNPENEILDIERSNSTVATNIALEISRLLASATPIGGILLGLFDAIWGSIGPSQWDLFLEQIELLIDQKIEEFARNQAISRLEGISSLYGIYTEAFREWEADPTNPALKEEMRTQFNDMNSILVTAIPLFSVQNYQVPFLSVYVQAANLHLSVLRDVSVFGQAWGFDIATINSRYNDLTRLIPIYTDYAVRWYNTGLDRLPRTGGLRNWARFNQFRRELTISVLDIISFFRNYDSRLYPIPTSSQLTREVYTDPVINITDYRVGPSFENIENSAIRSPHLMDFLNNLTIDTDLIRGVHYWAGHRVTSHFTGSSQVITTPQYGNSQNAEPRRTIAPSTFPGLNLFYRTLSNPFFRRSENITPTLGINVVQGVGFIQPNNAEVLYRSRGTVDSLNELPIDGENSLVGYSHRLSHVTLTRSLYNTNITSLPTFVWTHHSATNTNTINPDIITQIPLVKGFRLGGGTSVIKGPGFTGGDILRRNTIGEFVSLQVNINSPITQRYRLRFRYASSRDARITVAIGGQIRVDMTLEKTMEIGESLTSRTFSYTNFSNPFSFRANPDIIRIAEELPIRGGELYIDKIELILADATFEEEYDLERAQKAVNALFTSTNQLGLKTDVTDYHIDQVSNLVECLSDEFCLDEKRELSEKVKHAKRLSDERNLLQDPNFRGINRQPDRGWRGSTDITIQGGDDVFKENYVTLPGTFDECYPTYLYQKIDESKLKAYTRYELRGYIEDSQDLEIYLIRYNAKHETVNVPGTGSLWPLSAQSPIGKCGEPNRCAPHLEWNPNLDCSCRDGEKCAHHSHHFSLDIDVGCTDLNEDLGVWVIFKIKTQDGYARLGNLEFLEEKPLLGEALARVKRAEKKWRDKCEKLEWETNIVYKEAKESVDALFVNSQYDRLQADTNIAMIHAADKRVHSIREAYLPELSVIPGVNAAIFEELEGRIFTAFSLYDARNVIKNGDFNNGLSCWNVKGHVDVEEQNNHRSVLVVPEWEAEVSQEVRVCPGRGYILRVTAYKEGYGEGCVTIHEIEDNTDELKFSNCVEEEVYPNNTVTCNNYTATQEEHEGTYTSRNRGYDEAYESNSSVHASVYEEKSYTDRRRENPCESNRGYGDYTPLPAGYVTKELEYFPETDKVWIEIGETEGTFIVDSVELLLMEE

SEQ ID NO: 178 - protein, 1171 aa, Bacillus thuringiensis YBT-032; identical to SEQ ID NO: 176

SEQ ID NO: 179 - protein, 1171 aa, Bacillus thuringiensis JC190; identical to SEQ ID NO: 176

SEQ ID NO: 180 - protein, 1171 aa, Bacillus thuringiensis HZM2
MEIVNNQNQCVPYNCLNNPENEILDIERSNSTVATNIALEISRPLASATPIGGILLGLFDAIWGSIGPSQWDLFLEQIELLIDQKIEEFARNQAISRLEGISSLYGIYTEAFREWEADPTNPALKEEMRTQFNDMNSILVTAIPLFSVQNYQVPFLSVYVQAANLHLSVLRDVSVFGQAWGFDIATINSRYNDLTRLIPIYTDYAVRWYNTGLDRLPRTGGLRNWARFNQFRRELTISVLDIISFFRNYDSRLYPIPTSSQLTREVYTDPVINITDYRVGPSFENIENSAIRSPHLMDFLNNLTIDTDLIRGVHYWAGHRVTSHFTGSSQVITTPQYGITANAEPRRTIAPSTFPGLNLFYRTLSNPFFRRSENITPTLGINVVQGVGFIQPNNAEVLYRSRGTVDSLNELPIDGENSLVGYSHRLSHVTLTRSLYNTNITSLPTFVWTHHSATNTNTINPDIITQIPLVKGFRLGGGTSVIKGPGFTGGDILRRNTIGEFVSLQVNINSPITQRYRLRFRYASSRDARITVAIGGQIRVDMTLEKTMEIGESLTSRTFSYTNFSNPFSFRANPDIIRIAEELPIRGGELYIDKIELILADATFEEEYDLERAQKAVNALFTSTNQLGLKTDVTDYHIDQVSNLVECLSDEFCLDEKRELSEKVKHAKRLSDERNLLQDPNFRGINRQPDRGWRGSTDITIQGGDDVFKENYVTLPGTFDECYPTYLYQKIDESKLKAYTRYELRGYIEDSQDLEIYLIRYNAKHETVNVPGTGSLWPLSAQSPIGKCGEPNRCAPHLEWNPNLDCSCRDGEKCAHHSHHFSLDIDVGCTDLNEDLGVWVIFKIKTQDGYARLGNLEFLEEKPLLGEALARVKRAEKKWRDKCEKLEWETNIVYKEAKESVDALFVNSQYDRLQADTNIAMIHAADKRVHSIREAYLPELSVIPGVNAAIFEELEGRIFTAFSLYDARNVIKNGDFNNGLSCWNVKGHVDVEEQNNHRSVLVVPEWEAEVSQEVRGCPGRGYILRVTAYKEGYGEGCVTIHEIEDNTDELKFSNCVEEEVYPNNTVTCNNYTATQEEHEGTYTSRNRGYDEAYESNSSVHASVYEEKSYTDRRRENPCESNRGYGDYTPLPAGYVTKESEYFPETDKVWIEIGETEGTFIVDSVELLLMEE

SEQ ID NO: 181 - protein, 1174 aa, Bacillus thuringiensis aizawai PS81A2
MENNIENQCIPYNCLNNPEVEILGIERSNSNVAAEIGLGLSRLLVSRIPLGDFILGLFDVIWGAIGPSQWDIFLEQIELLIGQRIEEFARNQAISRLQGLSNLYRIYTNAFKNWEVDPTNPALREEMRIQFNDMNSALTTAIPLFSVQGYEIPLLSVYVQAANLHLSVLRDVSVFGQRWGFDVATINSRYNDLTRLIGEYTDYAVRWYNTGLNRLPRNEGVRGWARFNRFRRELTISVLDIISFFQNYDSRLYPIPTIYQLTREVYTDPVINITDYRVTPSFESIENSAIRSPHLMDFLNNIIIDTDLIRGVHYWAGHRVTSHFTGSSQVISSPQYGITANAEPSRTIAPSTFPGLNLFYRTLSDPFFRRSDNIMPTLGINVVQGVGFIQPNNGEVLYRRRGTVDSLDELPIDGENSLVGYSHRLSHVTLTRSLYNTNITSLPTFVWTHHSATDRNIIYPDVITQIPLVKSFSLTSGTSVVRGPGFTGGDIIRTNVNGNVLSMSLNFSNTSLQRYRVRVRYAASQTMVMRVNVGGSTTFDQGFPSTMSANGSLTSQSFRFAEFPVGISTSGSQTAGISISNNPGRQTFHLDRIEFIPVDATFEAEYDLERAQKAVNSLFTSSNQIELKTDVTDYHIDQVSNLVDCLSDEFCLDEKRELSEKVKHAKRLSDERNLLQDPNFRGINRQPDRGWRGSTDITIQGGDDVFKENYVTLPGTFDECYPTYLYQKIDESKLKAYNRYQLRGYIEDSQDLEIYLIRYNAKHETVNVPGTGSLWPLSVESPIGRCGEPNRCVPHLEWNPDLDCSCRDGEKCAHHSHHFSLDIDVGCTDLQEDLGVWVVFKIKTQEGYARLGNLEFIEEKPLIGEALSRVKRAEKKWRDKREKLQLETKRVYTEAKEAVDALFVDSQYDRLQADTNIGMIHAADRLVHQIHEAYLPELPFIPGINVVIFEELENRISTALSLYDARNVIKNGDFNNGLSCWNVKGHVDVVEQNNHRSVLVVPEWEAEVSQTIRVCPGRGYILRVTAYKEGYGEGCVTIHEIENNTDELKFKNCEEEEVYPTDTGTCNDYTAHQGTAGSTDSCNSRNIRYEDAYEMNTTASVNYKPTYEEERYTDVQGDNHCEYDRGYVNYRPVPAGYVTKELEYFPETDKVWIEIGETEGKFIVDNVELLLMEE

SEQ ID NO: 182 - protein, 1174 aa, Bacillus thuringiensis aizawai EG6346
MENNIQNQCVPYNCLNNPEVEILNEERSTGRLPLDISLSLTRFLLSEFVPGVGVAFGLFDLIWGFITPSDWSLFLLQIEQLIEQRIETLERNRAITTLRGLADSYEIYIEALREWEANPNNAQLREDVRIRFANTDDALITAINNFTLTSFEIPLLSVYVQAANLHLSLLRDAVSFGQGWGLDIATVNNHYNRLINLIHRYTKHCLDTYNQGLENLRGTNTRQWARFNQFRRDLTLTVLDIVALFPNYDVRTYPIQTSSQLTREIYTSSVIEDSPVSANIPNGFNRAEFGVRPPHLMDFMNSLFVTAETVRSQTVWGGHLVSSRNTAGNRINFPSYGVFNPGGAIWIADEDPRPFYRTLSDPVFVRGGFGNPHYVLGLRGVAFQQTGTNHTRTFRNSGTIDSLDEIPPQDNSGAPWNDYSHVLNHVTFVRWPGEISGSDSWRAPMFSWTHRSATPTNTIDPERITQIPLVKAHTLQSGTTVVRGPGFTGGDILRRTSGGPFAYTIVNINGQLPQRYRARIRYASTTNLRIYVTVAGERIFAGQFNKTMDTGDPLTFQSFSYATINTAFTFPMSQSSFTVGADTFSSGNEVYIDRFELIPVTATFEAEYDLERAQKAVNALFTSINQIGIKTDVTDYHIDQVSNLVDCLSDEFCLDEKRELSEKVKHAKRLSDERNLLQDPNFKGINRQLDRGWRGSTDITIQRGDDVFKENYVTLPGTFDECYPTYLYQKIDESKLKPYTRYQLRGYIEDSQDLEIYLIRYNAKHETVNVLGTGSLWPLSVQSPIRKCGEPNRCAPHLEWNPDLDCSCRDGEKCAHHSHHFSLDIDVGCTDLNEDLDVWVIFKIKTQDGHARLGNLEFLEEKPLVGEALARVKRAEKKWRDKREKLELETNIVYKEAKESVDALFVNSQYDQLQADTNIAMIHAADKRVHRIREAYLPELSVIPGVNVDIFEELKGRIFTAFFLYDARNVIKNGDFNNGLSCWNVKGHVDVEEQNNHRSVLVVPEWEAEVSQEVRVCPGRGYILRVTAYKEGYGEGCVTIHEIENNTDELKFSNCVEEEVYPNNTVTCNDYTANQEEYGGAYTSRNRGYDETYGSNSSVPADYASVYEEKSYTDGRRDNPCESNRGYGDYTPLPAGYVTKELEYFPETDKVWIEIGETEGTFIVDSVELLLMEE

SEQ ID NO: 183 - protein, 1174 aa, Bacillus thuringiensis aizawai PS81I; identical to SEQ ID NO: 182

SEQ ID NO: 184 - protein, 1174 aa, Bacillus thuringiensis BTS00349A
MKNNIQNQCVPYNCLSNPEVEILSEERSTGRLPLDISLSLTRFLLSEFVPGVGVAFGLFDLIWGFITPSEWSLFLLQIEQLIEQRIETLERNRAITTLRGLADSYEVYLEALREWEENPNNAQLREDVRIRFANTDDALITAINNFTLTSFEIPLLSVYVQAANLHLSLLRDAVSFGQGWGLDIATVNNHYNRLINLIHRYTEHCLDTYNQGLENLRGTNTRQWSRFNQFRRELTLTVLDIVALFPNYDARAYPIQTSSQLTREIYTSSVIEDSPVSANIPNGFNRAEFGVRPPHLMDFMNSLFVTAETVRSQTVWGGHLVSSRNTAGNPINFPIYGIFNPGGAIWIADEDPRPFYRTLSDPVFVRGGFGNPHYVLGLRGVAFQQTGTNHTRTFRNSGTIDSLDEIPPQDNSGAPWNDYSHVLNHVTFVRWPGEIAGSDSWRAPMFSWTHRSADRTNIINPNIITQIPAVKAHNLHSGSTVVRGPGFTGGDLLRRTNTGTFADIRVNITGPLSQRYRVRIRYASTTDLQFFTRINGTSVNQGNFQRTMNRGGNLESGNFRTAGFSTPFSFSNAQSTFTLGTQAFSNQEVYIDRIEFVPAEVTFEAESDLERAQKAVNALFTSTSQLGLKTNVTGYHIDQVSNLVACLSDEFCLDEKRELSEKVKHAKRLSDKRNLLQDPNFRGINRQPDHGWRGSTDITIQGGDDVFKENYVTLPGTFDECYPTYLYQKIDESKLKAYTRYQLRGYIEDSQDLEIYLIRYNSKHEIVNVPGTGSLWPLSVENQIGPCGEPNRCAPHLEWNPDLHCSCRDGEKCVHHSHHFSLDIDVGCTDLNEDLGVWLIFKIKTQDGHARLGNLEFLEEEPLLGEALARVKRAEKKWRDKREKLQLETNIVYKEAKESVDALFVNSQYDRLQADTNIAMIHAADKRVHRIREAYLPELSVIPGVNAAIFEELEGRIFTAYSLYDARNVIKNGNFNNGLLCWNVKGHVDVEEQNNHRSVLVIPEWEAEVSQKVRVCPGRGYILRVTAYKEGYGEGCVTIHEIEDNTDELKFSNCVEEGYPNNTVTCNEYTMNQGVGECTDACNVRNRGYEDAYGHNPSTPVHYTTPYEEETYTDERRENPCEANKGYVNYTPLPVGYVTKELEYFPETDTVWIEIGETEGTFIVDSVELLLMEE

SEQ ID NO: 185 - protein, 1168 aa, Bacillus thuringiensis morrisoni INA67
MKNNIQNQCVPYNCLSNPEVEILSEERSTGRLPLDISLSLTRFLLSEFVPGVGVAFGLFDLIWGFITPSEWSLFLLQIEQLIEQRIETLERNRAITTLRGLADSYEVYLEALREWEENPNNAQLREDVRIRFANTDDALITAINNFTLTSFEIPLLSVYVQAANLHLSLLRDAVSFGQGWGLDIATVNNHYNRLINLIHRYTEHCLDTYNQGLENLRGTNTRQWSRFNQFRRELTLTVLDIVALFPNYDARAYPIQTSSQLTREIYTSSVIEDSPVSANIPNGFNRAEFGVRPPHLMDFMNSLFVTAETVRSQTVWGGHLVSSRNTAGNPINFPIYGIFNPGGAIWIADEDPRPFYRTLSDPVFVRGGFGNPHYVLGLRGVAFQQTGTNHTRTFRNSGTIDSLDEIPPQDNSGAPWNDYSHVLNHVTFVRWPGEIAGSDSWRAPMFSWTHRSADRTNIINPNIITQIPAVKAHNLHSGSTVVRGPGFTGGDLLRRTNTGTFADIRVNITGPLSQRYRVRIRYASTTDLQFFTRINGTSVNQGNFQRTMNRGGNLESGNFRTAGFSTPFSFSNAQSTFTLGTQAFSNQEVYIDRIEFVPAEVTFEAESDLERAQKAVNALFTSTSQLGLKTNVTGYHIDQVSNLVACLSDEFCLDEKRELSEKVKHAKRLSDKRNLLQDPNFRGINRQPDHGWRGSTDITIQGGDDVFKENYVTLPGTFDECYPTYLYQKIDESKLKAYTRYQLRGYIEDSQDLEIYLIRYNSKHEIVNVPGTGSLWPLSVENQIGPCGEPNRCAPHLEWNPDLHCSCRDGEKCVHHSHHFSLDIDVGCTDLNEDLGVWLIFKIKTQDGHARLGNLEFLEEEPLLGEALARVKRAEKKWRDKREKLQLETNIVYKEAKESVDALFVNSQYDRLQADTNIAMIHAADKRVHRIREAYLPELSVIPGVNAAIFEELEGRIFTAYSLYDARNVIKNGNFNNGLLCWNVKGHVDVEEQNNHRSVLVIPEWEAEVSQKVRVCPGRGYILRVTAYKEGYGEGCVTIHEVDNNTDELKFSNCEKEQVYPGNTVACNDYNKNHGANACSSRNRGYDESYESNSSIPADYAPVYEEEAYTDGQRGNPCEFNRGHTPLPAGYVTAELEYFPETDTVWVEIGETEGTFIVDSVELLLMEE

SEQ ID NO: 186 - protein, 1169 aa, Bacillus thuringiensis morrisoni
MKNNIQNQCVPYNCLSNPEVEILSEERSTGRLPLDISLSLTRFLLSEFVPGVGVAFGLFDLIWGFITPSEWSLFLLQIEQLIEQRIETLERNRAITTLRGLADSYEVYLEALREWEENPNNAQLREDVRIRFANTDDALITAINNFTLTSFEIPLLSVYVQAANLHLSLLRDAVSFGQGWGLDIATVNNHYNRLINLIHRYTEHCLDTYNQGLENLRGTNTRQWSRFNQFRRELTLTVLDIVALFPNYDARAYPIQTSSQLTREIYTSSVIEDSPVSANIPNGFNRAEFGVRPPHLMDFMNSLFVTAETVRSQTVWGGHLVSSRNTAGNPINFPIYGVFNPGGAIWIADEDPRPFYRTLSDPVFVRGGFGNPHYVLGLRGVGFQQTGTNHTRTFRNSGTIDSLDEIPPQDNSGAPWNDYSHVLNHVTFVRWPGEIAGSDSWRAPMFSWTHRSADRTNIINPNIITQIPAVKAHNLHSGSTVVRGPGFTGGDLLRRTNTGTFADIRVNITGPLSQRYRVRIRYASTTDLQFFTRINGTSVNQGNFQRTMNRGGNLESGNFRTAGFSTPFSFSNAQSTFTLGTQAFSNQEVYIDRIEFVPAEVTFEAESDLERAQKAVNALFTSTSQLGLKTNVTGYHIDQVSNLVACLSDEFCLDEKRELSEKVKHAKRLSDKRNLLQDPNFRGINRQPDHGWRGSTDITIQGGDDVFKENYVTLPGTFDECYPTYLYQKIDESKLKAYTRYQLRGYIEDSQDLEIYLIRYNSKHEIVNVPGTGSLWPLSVENQIGPCGEPNRCAPHLEWNPDLHCSCRDGEKCVHHSHHFSLDIDVGCTDLNEDLGVWLIFKIKTQDGHARLGNLEFLEEEPLLGEALARVKRAEKKWRDKREKLQLETNIVYKEAKESVDALFVNSQYDRLQADTNIAMIHAADKRVHRIREAYLPELSVIPGVNAAIFEELEGRIFTAYSLYDARNVIKNGNFNNGLLCWNVKGHVDVEEQNNHRSVLVVPEWEAEVSQEVRVCPGRGYILRVTAYKEGYGEGCVTIHEVDNNTDELKFSSNCEKEQVYPGNTVACNDYNKNHGANACSSRNGGYDESYESNSSIPADYAPVYEEEAYTDGQRGNPCEFNRGHTPLPAGYVTAELEYFPETDTVWVEIGETEGTFIVDSVELLLMEE

SEQ ID NO: 187 - protein, 1174 aa, Bacillus thuringiensis B-Pr-88; identical to SEQ ID NO: 184

SEQ ID NO: 188 - protein, 1168 aa, Bacillus thuringiensis 012
MENNIQNQCVPYNCLSNPEVEILSEERSTGRLPLDISLSLTRFLLSEFVPGVGVAFGLFDLIWGFITPSEWSLFLLQIEQLIEQRIETLERNRAITTLRGLADSCEVYLEALREWEENPNNAQLREDVRIRFANTDDALITAINNFTLTSFEIPLLSVYVQAANLHLSLLRDAVSFGQGWGLDIATVNNHYNRLINLIHRYTEHCLDTYNQGLENLRGTNTRQWSRFNQFRRELTLTVLDIVALFPNYDARAYPIQTSSQLTREIYTSSVIEDSPVSANIPNGFNRAEFGVRPPHLMDFMNSLFVTAETVRSQTVWGGHLVSSRNTAGNPINFPIYGVFNPGGAIWIADEDPRPFYRTLSDPVFVRGGFGNPHYVLGLRGVGFQQTGTNHTRTFRNSGTIDSLDEIPPQDNSGAPWNDYSHVLNHVTFVRWPGEIAGSDSWRAPMFSWTHRSADRTNIINPNIITQIPAVKAHNLHSGSTVVRGPGFTGGDLLRRTNTGTFADIRVNITGPLSQRYRVRIRYASTTDLQFFTRINGTSVNQGNFQRTMNRGDNLESGNFRTAGFSTPFSFSNAQSTFTLGTQAFSNQEVYIDRIEFVPAEVTFEAESDLERAQKAVNALFTSTSQLGLKTNVTGYHIDQVSNLVACLSDEFCLDEKRELSEKVKHAKRLSDKRNLLQDPNFRGINRQPDHGWRGSTDITIQGGDDVFKENYVTLPGTFDECYPTYLYQKIDESKLKAYTRYQLRGYIEDSQDLEIYLIRYNSKHEIVNVPGTGSLWPLSVENQIGPCGEPNRCAPHLEWNPDLHCSCRDGEKCVHHSHHFSLDIDVGCTDLNEDLGVWLIFKIKTQDGHARLGNLEFLEEEPLLGEALARVKRAEKKWRDKREKLQLETNIVYKEAKESVDALFVNSQYDRLQADTNIAMIHAADKRVHRIREAYLPELSVIPGVNAAIFEELEGRIFTAYSLYDARNVIKNGNFNNGLLCWNVKGHVDVEEQNNHRSVLVVPEWEAEVSQEVRVCPGRGYILRVTAYKEGYGEGCVTIHEVDNNTDELKFSSCEKEQVNPGNTVACNDYNKNHGANACSSRSRGYDESYESNSSIPADYAPVYEEEAYTDGQRGNPCEFNRGHTPLPAGYVTAELEYFPETDTVWVEIGETEGTFIVDSVELLLMEE

SEQ ID NO: 189 - protein, 1174 aa, Bacillus thuringiensis 087
MENNIQNQCVPYNCLSNPEVEILSEERSTGRLPLDISLSLTRFLLSEFVPGVGVAFGLFDLIWGFITPSEWSLFLLQIEQLIEQRIETLERNRAITTLRGLADSYEVYLEALREWEENPNNAQLREDVRIRFANTDDALITAINNFTLTSFEIPLLSVYVQAANLHLSLLRDAVSFGQGWGLDIATVNNHYNRLINLIHRYTEHCLDTYNQGLENLRGTNTRQWSRFNQFRRELTLTVLDIVALFPNYDAGAYPIQTSSQLTREIYTSSVIEDSPVSANIPNGFNRAEFGVRPPHLMDFMNSLFVTAETVRSQTVWGGHLVSSRNTAGNPINFPIYGIFNPGGAIWIADEDPRPFYRTLSDPVFVRGGFGNPHYVLGLRGVAFQQTGTNHTRTFRNSGTIDSLDEIPPQDNSGAPWNDYSHVLNHVTFVRWPGEIAGSDSWRAPMFSWTHRSADRTNIINPNIITQIPAVKAHNLHSGSTVVRGPGFTGGDLLRRTNTGTFADIRVNITGPLSQRYRVRIRYASTTDLQFFTRINGTSVNQGNFQRTMNRGGNLESGNFRTAGFSTPFSFSNAQSTFTLGTQAFSNQEVYIDRIEFVPAEVTFEAESDLERAQKAVNALFTSTSQLGLKTNVTGYHIDQVSNLVACLSDEFCLDEKRELSEKVKHAKRLSDKRNLLQDPNFRGISRQPDHGWRGSTDITIQGGDDVFKENYVTLPGTFDECYPTYLYQKIDESKLKAYTRYQLRGYIEDSQDLEIYLIRYNSKHEIVNVPGTGSLWPLSVENQIGPCGEPNRCAPHLEWNPDLHCSCRDGEKCVHHSHHFSLDIDVGCTDLNEDLGVWLIFKIKTQDGHARLGNLEFLEEEPLLGEALARVKRAEKKWRDKREKLQLETNIVYKEAKESVDALFVNSQYDRLQADTNIAMIHAADKRVHRIREAYLPELSVIPGVNAAIFEELEGRIFTAYSLYDARNVIKNGNFNNGLLCWNVKGHVDVEEQNNHRSVLVIPEWEAEVSQKVRVCPGRGYILRVTAYKEGYGEGSVTIHEIEDNTDELKFSNCVEEGYPNNTVTCNEYTMNQGVGECTDACNVRNRGYEDAYGHNPSTPVHYTTPYEEETYTDERRENPCEANKGYVNYTPLPVGYVTKELEYFPETDKVWVEIGETEGTFIVDSVELLLMEE

SEQ ID NO: 190 - protein, 1166 aa, Bacillus thuringiensis BTS0349A
MEISDQNQYIPYNCLNNPESEIFNARNSNFGLVSQVSSGLTRFLLEAAVPEAGFALGLFDIIWGALGVDQWSLFLRQIEQLIRQEITELERNRATAILTGLSSSYNLYVEALREWENDPNNPASQERVRTRFRLTDDAIVTGLPTLAIRNLEVVNLSVYTQAANLHLSLLRDAVYFGERWGLTQANIEDLYTRLTSNIQEYSDHCARWYNQGLNEIGGISRRYLDFQRDLTISVLDIVALFPNYDIRTYPIPTQSQLTREIYTSPVVAGNINFGLSIANVLRAPHLMDFIDRIVIYTNSVRSTPYWAGHEVISRRTGQGQGNEIRFPLYGVAANAEPPVTIRPTGFTDEQRQWYRARSRVVSFRSSGQDFSLVDAVGFLTIFSAVSIYRNGFGFNTDTIDEIPIEGTDPFTGYSHRLCHVGFLASSPFISQYARAPIFSWTHRSATLTNTIAPDVITQIPLVKAFNLHSGATIVKGPGFTGGDILRRTNVGSFGDMRVNITAPLSQRYRVRIRYASTTDLQFYTNINGTTINIGNFSSTMDSGDDLQYGRFRVAGFTTPFTFSDANSTFTIGAFGFSPNNEVYIDRIEFVPAEVTFEAEYDLEKAQKAVNALFTSSNQIGLKTDVTDYHIDKVSNLVECLSDEFCLDEKRELSEKVKHAKRLSDERNLLQDPNFRGINRQPDRGWRGSTDITIQGGDDVFKENYVTLPGTFDGCYPTYLYQKIDESKLKVYTRYQLRGYIEDSQDLEIYLIRYNAKHETVNVPGTGSLWPLSAQSPIGKCGEPNRCAPHLEWNPDLDCSCRNGEKCAHHSHHFSLDIDVGCTDLNEDLGVWVIFKIKTQDGHARLGNLEFLEEKPLLGEALARVKRAEKKWRDKREKLELETNIVYKEAKESVDALFVNSQYDQLQADTNIAMIHAADKRVHSIREAYLPELSVIPGVNAAIFEELEGRIFTAFSLYDARNVIKNGDFNNGLSCWNVKGHVDVEEQNNHRSVLVVPEWEAEVSQEVRVCPGRGYILRVTAYKEGYGEGCVTIHEIENNTDELKFSNCVEEEVYPNNTVTCNDYTANQEEYKGAYTSHNRGYDEAYGNNPSVPADYTPVYEEKAYTDGRRENPCESNRGYGDYTPLPAGYVTKELEYFPETDKVWIEIGETEGTFIVESVELLLMEE

SEQ ID NO: 191 - protein, 1173 aa, Bacillus thuringiensis wuhanensis
MEISDQNQYIPYNCLNNPESEIFNARNSNFGLVSQVSSGLTRFLLEAAVPEAGFALGLFDIIWGALGVDQWSLFLRQIEQLIRQEITELERNRATAILIGLSSSYNLYVEALREWENDPNNPASQERVRTRFRLTDDAIVTGLPTLAIRNLEVVNLSVYTQAANLHLSLLRDAVYFGERWGLTQANIEDLYTRLTSNIQEYSDHCARWYNQGLNEIGGISRRYLDFQRDLTISVLDIVAPFSPNYDIRTYPIPTQSQLTREIYTSPVVAGNINFGLSIANVLRAPHLMDFIDRIVIYTNSVRSTPYWAGHEVISRRTGQAQGNEIRFPLYGVAANAEPPVTIRPTGFTDEQRQWYRARSLLSRFRSSGQDFSLVDAVAFLTIFSAVSIYRNGFGFNTDTIDEIPIEGTDPFTGYSHRLCHVGFLASSPFISQYARAPIFSWTHRSATLTNTIAPDVITQIPLVKAFNLHSGATIVKGPGFTGGDILRRTNVRSFRDMRVNITAPLSQRYRVRIRYASTTDLQFYTNINGTTINIGNFSSTMDSGDDLQYGRFRVAGFTTPFTFSRCKQTFHNRSFWFSPKLTEVYIDRIEFVPAEVTFEAEYDLEKAQKAVNALFTSSNQIGLKTDVTDYHIDKVSNLVECLSDEFCLDEKRELSEKVKHAKRLSDERNLLQDPNFRGINRQPDRGWRGSTDITIQGGDDVFKENYVTLPGTFDGCYPTYLYQKIDESKLKAYTRYQLRGYIEDSQDLEIYLIRYNAKHETVNVPGTGSLWPLSAQSPIGKCGEPNRCAPHLEWNPYLDCSCRNGKKCAHHSHHFSLDIDVGCTDLNEDLGVWVIFKIKTQDGHARLGNLEFLEEKPLLGEALARVKRAEKKWRDKREKLELETNIVYKEAKESVDALFVNSQYDQLQADTNIAMIHAADKRVHSIREAYLPELSVIPGVNAAIFEELEGRIFTAFSLYDARNVIKNGDFNNGLSCWNVKGHVDVEEQNNHRSVLVVPEWEAEVSQEVRVCPGRGYILRVTAYKEGYGEGCVTIHESRTIQRTEIQQLLEEEVYPNNTVTCNDYTANQEEYKGAYTSHNRGYDEAYGNNPSVPADYTPVYEEKAYTDGRRDNPCESNRGYGDYTPLPAGYVSKELEYFPETDKVWIEIGETEGTFIVESVNYSLWRNRIRFKM

SEQ ID NO: 192 - protein, 1169 aa, Bacillus thuringiensis wuhanensis HD525
MEINNQNQCVPYNCLNNPESEILNVAIFSSEQVAEIHLKITRLILENFLPGGSFAFGLFDLIWGIFNEDQWSAFLRQVEELINQRITEFARGQAIQRLVGFGRSYDEYILALKEWENDPDNPASKERVRTRFRTTDDALLTGVPLMAIPGFELATLSVYAQSANLHLALLRDAVFFGERWGLTQTNINDLYSRLKNSIRDYTNHCVRFYNIGLGNLNVIRPEYYRFQRELTISVLDLVALFPNYDIRTYPIPTKSQLTREIYTDPIISPGAQAGYTLQDVLREPHLMDFLNRLIIYTGEYRGIRHWAGHEVESSRTGMMTNIRFPLYGTAATAEPTRFITPSTFPGLNLFYRTLSAPIFRDEPGANIIIRYRTSLVEGVGFIQPNNGEQLYRVRGTLDSLDQLPLEGESSLTEYSHRLCHVRFAQSLRNAEPLDYARVPMFSWTHRSATPTNTIDPDVITQIPLVKAFNLHSGATVVRGPGFTGGDILRRTNAGNFGDMRVNITAPLSQRYRVRIRYASTANLQFHTSINGRAINQANFPATMNSGENLQSGSFRVAGFTTPFTFSDALSTFTIGAFSFSSNNEVYIDGIEFVPAEVTFATESDQDRAQKAVNALFTSSNQIGLKTDVTNYHIDQVSNLVECLSDEFCLDEKRELSEKVKHAKRLCDERNLLQDPNFRGINREPDRGWRGSTDITIQRGDDVFKENYVTLPGTFDECYPTYLYQKIDESKLKAYTRYELRGYIEDSQDLEIYLIRYNAKHETVNVPGTGSLWPLSAQSPIGKCGEPNRCATHLEWNPDLDCSCRDGEKCAHHSHHFSLDIDVGCTDLNEDLGVWVIFKIKTQDGHARLGNLEFLEEKPLLGEALARVKRAEKKWRDKREKLELETNIVYKEAKKSVDALFVNSQYDRLQADTNIAIIHAADKRVHSIREAYLPELSVIPGVNAAIFEELEGRIFTAYSLYDARNVIKNGDFNNGLSCWNVKGHVDVEEQNNHRSVLVVPEWEAEVSQEVRVCPGRGYILRVTAYKEGYGEGCVTIHEIEDNTDELKFSNCVEEEIYPNNTVTCNDYTATQEEYEGTYTSRNRGYDGAYESNSSVPADYASAYEEKAYTDGRRDNTCESNRGYGDYTPLPAGYVTKELEYFPETDKVWIEIGETEGTFIVDSVELLLMEE

SEQ ID NO: 193 - protein, 1169 aa, Bacillus thuringiensis B-Pr-88
MEINNQNQCVPYNCLNNPESEILNVAIFSSEQVAEIHLKITRLILENFLPGGSFAFGLFDLIWGIFNEDQWSAFLRQVEELINQRITEFARGQAIQRLVGFGRSYDEYILALKEWENDPDNPASKERVRTRFRTTDDALLTGVPLMAIPGFELATLSVYAQSANLHLALLRDAVFFGERWGLTQTNINDLYSRLKNSIRDYTNHCVRFYNIGLGNLNVIRPEYYRFQRELTISVLDLVALFPNYDIRTYPIPTKSQLTREIYTDPIISPGAQAGYTLQDVLREPHLMDFLNRLIIYTGEYRGIRHWAGHEVESSRTGMMTNIRFPLYGTAATAEPTRFITPSTFPGLNLFYRTLSAPIFRDEPGANIIIRYRTSLVEGVGFIQPNNGEQLYRVRGTLDSLDQLPLEGESSLTEYSHRLCHVRFAQSLRNAEPLDYARVPMFSWTHRSATPTNTIDPDVITQIPLVKAFNLHSGATVVRGPGFTGGDILRRTNAGNFGDMRVNITAPLSQRYRVRIRYASTANLQFHTSINGRAINQANFPATMNSGENLQSGSFRVAGFTTPFTFSDALSTFTIGAFSFSSNNEVYIDRIEFVPAEVTFATESDQDRAQKAVNALFTSSNQIGLKTDVTNYHIDQVSNLVECLSDEFCLDEKRELSEKVKHAKRLCDERNLLQDPNFRGINREPDRGWRGSTDITIQRGDDVFKENYVTLPGTFDECYPTYLYQKIDESKLKAYTRYELRGYIEDSQDLEIYLIRYNAKHETVNVPGTGSLWPLSAQSPIGKCGEPNRCATHLEWNPDLDCSCRDGEKCAHHSHHFSLDIDVGCTDLNEDLGVWVIFKIKTQDGHARLGNLEFLEEKPLVGEALARVKRAEKKWRDKREKLELETNIVYKEAKKSVDALFVNSQYDRLQADTNIAIIHAADKRVHSIREAYLPELSVIPGVNAAIFEELEGRIFTAYSLYDARNVIKNGDFNNGLSCWNVKGHVDVEEQNNHRSVLVVPEWEAEVSQEVRVCPGRGYILRVTAYKEGYGEGCVTIHEIEDNTDELKFSNCVEEEIYPNNTVTCNDYTATQEEYEGTYTSRNRGYDGAYESNSSVPADYASAYEEKAYTDGRRDNTCESNRGYGDYTPLPAGYVTKELEYFPETDKVWIEIGETEGTFIVDSVELLLMEE

SEQ ID NO: 194 - protein, 1167 aa, Bacillus thuringiensis
MERNNQDQCIPYNCLNNPEIEILDVENFNLELVSQVSVGLTRFLLESAVPGAGFALGLFDIIWGALGVDQWSLFLAQIEQLINERITTVERNRAIQTLSGLSSSYEVYIEALREWENNPDNPASQERVRTRFRTTDDALITAIPNLAIPDFEIATLSVYVQAANLHLSLLRDAVYFGERWGLTQVNIEDLYTRLTRNIHIYSDHCARWYNQGLNNIGATNTRYLEFQRELTLSVLDIVALFPNYDIRTYSIPTQSQLTREIYTDIIAAPNASNLIVGTQGLVRAPHLMDFLVRLNIYTGLARNIRHWAGHEVISRRTGGVDLNTIQSPLYGTAATTESPRLIIPFNEDSYLGGFIYRTLSSPIYVPPSGISSQRTSLVEGVGFQTPNNSILQYRQRGTLDSLEQVPLQEEGRPGGFGASHRLCHATFAQSPIGTNYYIRAPLFSWTHLSATLTNEVRVSRITQLPMVKAHTLHAGATVVRGPGFTGGDILRRTTSGSFGDMRITNFSSSSSRYRVRIRYASTTDLQFFLNVGGTPVNVADFPKTIDRGENLEYGSFRTAGFTTPFSFVSSTNNFTLGVQSVSSGNEIFVDRIEFVPADATFEAEYDLERAQEAVNALFTSTNQRGLKTDVTDYHIDQVSNLVDCLSDEFCLDEKRELSEKIKHAKRLSDERNLLQDSNFRGINRQPDRGWRGSTDITIQGGNDVFKENYVTLPGTFDECYPTYLYQKIDESKLKAFTRYQLRGYIEDSQDLEIYLIRYNAKHETVNVPGTGSLWPLSAQSPIGKCGEPNRCAPHLEWNPDLDCSCRDGEKCAHHSHHFSLDIDVGCTDLNEDLGVWVIFKIKTQDGHARLGNLEFLEEKPLVGEALARVKRAEKKWRDKREKLEWETNIVYKEAKESVDALFVNSQYDQLQADTNIAMIHAADKRVHSIREAYLPELSVIPGVNAAIFEELEGRIFTAFSLYDARNVIKNGDFNNGLSCWNVKGHVDVEEQNNQRSVLVVPEWEAEVSQEVRVCPGRGYILRVTAYKEGYGEGCVTIHEIENNTDELKFSNCVEEEIYPNNTVTCNDYTVNQEEYGGAYTSRNRGYNEAPSVPADYASVYEEKSYTDGRRENPCEFNRGYRDYTPLPVGYVTKELEYFPETDKVWIEIGETEGTFIVDSVELLLMEE

SEQ ID NO: 195 - protein, 1172 aa, Bacillus thuringiensis BTS02069AA
MEIINNQNQYVPYNCLSNPENEILDIESLSSRSREQVAEISLGLTRFLLESLLPGASFGFALFDIIWGVIGPDQWNLFLAQIEQLIDQRIEAHVRNQAISRLEGLGDSYEVYIESLREWEASPNNEALQQDVRNRFSNTDNALITAIPILREQGFEIPLLSVYVQAANLHLSLLRDAVYFGQRWGLDTVTVNNHYNRLINLINTYSDHCAQWFNRGLDNFGGVSARYLDFQREVTISVLDIVALFPNYDIRTYPISTQSQLTREIYTSPVAEPGASLNANLQNILREPHLMDFLTRLVIYTGVQSGIYHWAGHEISSRTTGNLSSNIQFPLYGTAASADRAFNMNIHHSETIYRTLSAPIYSVSGGISPNRTRVVEGVRFLIARDNNLDSLPFLYRKEGTLDSFTELPPEDESTPPYIGYSHRLCHARFARSPVILEPSNFARLPVFSWTHRSASPTNEVSPSRITQIPWVKAHTLASGASVIKGPGFTGGDIMTRNNINLGDLGTLRVTVTGRLPQSYYIRLRYASVANSSGVFRHLPQPSYGISFPRTMGTDEPLTSRSFALTTLFTPITLTRAQEEFNLTIPRGVYIDRIEFVPVDATFEAGYDLERAQKAVNALFTSTNQRGLKTDITDYHIDQVSNLVECLSDEFCLDEKRELSEKVKHAKRLSDGRNLLQDRNFISINGLLDRGWRGSTDITIQGSDDVFKENYVTLPGTFDECYPTYLYQKIDESKLKAYTRYQLRGYIEDSQDLEIYLIRYNAKHEIVNVPGTGSLWPLSVENSIGPCGESNRCAPHLEWNPNLDCSCRDGEKCAHHSHHFSLDIDVGCTDLNEDLGVWVIFKIKTQDGHARIGNLEFLEEKPLVGEALARVKRAEKKWRDKRKKLEFETNIVYKEAKESVDALFVNSQYDKLKADTNIAMIHAADKRVHRIREAYLPELSVIPGVNADIFEELEGRIFTAYSLYDARNVIKNGDFNNGLLCWNVKGHVDVEEQNNHRSVLVVPEWEAEVSQEVRVCPGRGYILRVTAYKEGYGEGCVTIHEIEDNTDELKFSNCVEEEVYPSNTVTCNDYTANQEEYEGTYTSRNQGYDEAYESNSSVPANYASVYEEKAYTDGRRENSCEFNRGYRDYTPLPAGYVTKELEYFPGTAKVWIEIGETEGTFIVDSVELLLMEE

SEQ ID NO: 196 - protein, 1155 aa, Bacillus thuringiensis morrisoni BF190
MEVNHQNECVPYNCLKNPKIEMLDIEGISSRSREQVAEISLGLTRFLLESLLPGASFGFGLFDIIWGVIGPDQWSLFLTQIEQLIDQRIEAHVRNQAISRLEGLGDSYEVYIESLREWEASPNNESLQQDVRNRFSNTDNALITAIPILREQGFEIPLLTVYVQAANLHLSLLRDAVYFGQRWGLDTATVNNHYNRLINLINTYSDHCAQWFNRGLDNFGVVTARYLDFQREVTISVLDIVALFPNYDIRTYPIQTLSQLTREIYTSPVAEPGASLNVDLRNILREPHLMDFLTRLVIYTGVQGGIYHWAGHEISSRTTGNLSSNIQFPLYGTSANADRPFNLAIHYSETIYRTLSAPIYSVSGGISPNRTRAVEGVRFLTARDNNLNSLPFLYRKEGSLDSFTELPPEDENEPPYIGYSHRLCHARFARSSVVLEPSNFARIPVFSWTHRSAGPTNEVSSSRITQIPWVKAHTLDSGAFVIKGPGFTGGDILTRPNLGTLGALRVTLTGQLPQTYNIRIRYASIANRGGTLIFSQPPSYGLTFPKTMDIDEPLTSRSFARTTLFTPITFTQAQAELNLTIQQGVYIDRIEFIPVNATFEAEYDLERAQEAVNALFTSSNQLGLKTDLTDYHIDQVSNLVDCLSDEFCIDEKRELSEKVKHAKRLSDERNLLQDSNFRGINRQPDRGWRGSTDITIQGGNDVFKENYVTLPGTFDECYPTYLYQKIDESKLKAYTRYQLRGYIEDSQDLEIYLIRYNAKHETVNVPGTGSLWPLSVESPIGKCGEPNRCVPQLEWNSNLDCSCRDGEKCAHHSHHFSLDIDVGCTDLNEDLGVWVIFKIKTQDGHARLGNLEFLEEKPLLGEALARVKRAEKKWRDKRETLQLETNIVYKEAKESVDALFANSQYNRLQADTNIAMIHAADKRVHRIREAYLPELSVIPGVNAGIFEELEGRIFTAFSLYDARNVIKNSDFNNGLSCWNVKGHVDIEEQNNHRSVLVVPEWEAEVSQKVHVCPGRGYILRVTAYKEGYGEGCVTIHEIEDHTDELKFRNCEEDEVYPNNTRTCNAYPADQEGYEGACTSRNRGYDEVYGNTPSLPADYAPIYEENAYTDGRRGNPCESSRGYGDYTPLPAGYETKELEYFPETDTVWPRNRYSVD

SEQ ID NO: 197 - protein, 140 aa, Bacillus thuringiensis JC291
QCVPYNCLSNPENEILDIESLSSRSREQVAEISLGLTRFLLESLLPGASFGFALFDIIWGVIGPDQWNLFLAQIEQLIDQRIEAHVRNQAISRLEGLGDSYEVYIESLREWEGSPNNEGLQQDVRNRFSNTDNALITGYL

SEQ ID NO: 198 - protein, 719 aa, Bacillus thuringiensis kurstaki
MKLKNQDKHQSFSSNAKVDKISTDSLKNETDIELQNINHEDCLKMSEYENVEPFVSASTIQTGIGIAGKILGTLGVPFAGQVASLYSFILGELWPKGKNQWEIFMEHVEEIINQKISTYARNKALTDLKGLGDALAVYHDSLESWVGNRNNTRARSVVKSQYIALELMFVQKLPSFAVSGEEVPLLPIYAQAANLHLLLLRDASIFGKEWGLSSSEISTFYNRQVERAGDYSYHCVKWYSTGLNNLRGTNAESWVRYNQFRRDMTLMVLDLVALFPSYDTQMYPIKTTAQLTREVYTDAIGTVHPHPSFTSTTWYNNNAPSFSAIEAAVVRNPHLLDFLEQVTIYSLLSRWSNTQYMNMWGGHKLEFRTIGGTLNISTQGSTNTSINPVTLPFTSRDVYRTESLAGLNLFLTQPVNGVPRVDFHWKFVTHPIASDNFYYPGYAGIGTQLQDSENELPPEATGQPNYESYSHRLSHIGLISASHVKALVYSWTHRSADRTNTIEPNSITQIPLVKAFNLSSGAAVVRGPGFTGGDILRRTNTGTFGDIRVNINPPFAQRYRVRIRYASTTDLQFHTSINGKAINQGNFSATMNRGEDLDYKTFRTVGFTTPFSFLDVQSTFTIGAWNFSSGNEVYIDRIEFVPVEVTYEAEYDFEKAQEKVTALFTSTNPRGLKTDVKDYHIDQVSNLVESLSDEFYLDEKRELFEIVKYAKQLHIERNM

SEQ ID NO: 199 - protein, 719 aa, Bacillus thuringiensis thuringiensis
MKLKNQDKHQSFSSNAKVDKISTDSLKNETDIELQNINHEDCLKMSEYENVEPFVSASTIQTGIGIAGKILGTLGVPFAGQVASLYSFILGELWPKGKNQWEIFMEHVEEIINQKISTYARNKALTDLKGLGDALAVYHDSLESWVGNRNNTRARSVVKSQYIALELMFVQKLPSFAVSGEEVPLLPIYAQAANLHLLLLRDASIFGKEWGLSSSEISTFYNRQVERAGDYSDHCVKWYSTGLNNLRGTNAESWVRYNQFRRDMTLMVLDLVALFPSYDTQMYPIKTTAQLTREVYTDAIGTVHPHPSFTSTTWYNNNAPSFSAIEAAVVRNPHLLDFLEQVTIYSLLSRWSNTQYMNMWGGHKLEFRTIGGTLNISTQGSTNTSINPVTLPFTSRDVYRTESLAGLNLFLTQPVNGVPRVDFHWKFVTHPIASDNFYYPGYAGIGTQLQDSENELPPEATGQPNYESYSHRLSHIGLISASHVKALVYSWTHRSADRTNTIEPNSITQIPLVKAFNLSSGAAVVRGPGFTGGDILRRTNTGTFGDIRVNINPPFAQRYRVRIRYASTTDLQFHTSINGKAINQGNFSATMNRGEDLDYKTFRTVGFTTPFSFLDVQSTFTIGAWNFSSGNEVYIDRIEFVPVEVTYEAEYDFEKAQEKVTALFTSTNPRGLKTDVKDYHIDQVSNLVESLSDEFYLDEKRELFEIVKYAKQLHIERNM

SEQ ID NO: 200 - protein, 719 aa, Bacillus thuringiensis kurstaki BNS3
MKLKNQDKHQSFSSNAKVDKISTDSLKNETDIELQNINHEDCLKMSEYENVEPFVSASTIQTGIGIAGKILGTLGVPFAGQVASLYSFILGELWPKGKNQWEIFMEHVEEIINQKISTYARNKALTDLKGLGDALAVYHDSLESWVGNRNNTRARSVVKSQYIALELMFVQKLPSFAVSGEEVPLLPIYAQAANLHLLLLRDASIFGKEWGLSSSEISTFYNRQVERAGDYSDHCVKWYSTGLNNLRGTNAESWVRYNQFRRDMTLMVLDLVALFPSYDTQMYPIKTTAQLTREVYTDAIGTVHPHPSFTSTTWYNNNAPSFSAIEAAVVRNPHLLDFLEQVTIYSLLSRWSNTQYMNMWGGHKLEFRTIGGTLNISTQGSTNTSINPVTLPFTSRDVYRTESLAGLNLFLTQPVNGVPRVDFHWKFVTHPIASDNFYYPGYAGIGTQLQDSENELPPEATGQPNYESYSHRLSHIGLISASHVKALVYSWTHRSADRTNTIEPNSITQIPLVKAFNLSSGAAVVRGPGFTGGDILRRTNTGTFGDIRVNINPPFAQRYRVRIRYASTTDLQFHTSINGKAINQGNFSATMNRGEDLDYKTFRTVGFTTPFSFLDVQSTFTIGAWNFSSGNEVYIDRIEFVPVEVTYEAEYDFEKAQEKVTALFTSTNPRGLKTDVKDYHIDQVSNLVESLSDEFYLDEKRELFEIVKYANELHIERNM

SEQ ID NO: 201 - protein, 719 aa, Bacillus thuringiensis
MKLKNQDKHQSFSSNAKVDKISTDSLKNETDIELQNINHEDCLKMSEYENVEPFVSASTIQTGIGIAGKILGTLGVPFAGQVASLYSFILGELWPKGKNQWEIFMEHVEEIINQKISTYARNKALTDLKGLGDALAVYHDSLESWVGNRNNTRARSVVRSQYIALELMFVQKLPSFAVSGEEVPLLPIYAQAANLHLLLLRDASIFGKEWGLSSSEISTFYNRQVERAGDYSDHCVKWYSTGLNNLRGTNAESWVRYNQFRRDMTLMVLDLVALFPSYDTQMYPIKTTAQLTREVYTDAIGTVHPHPSFTSTTWYNNNAPSFSAIEAAVVRNPHLLDFLEQVTIYSLLSRWSNTQYMNMWGGHKLEFRTIGGTLNISTQGSTNTSINPVTLPFTSRDVYRTESLAGLNLFLTQPVNGVPRVDFHWKFVTHPIASDNFYYPGYAGIGTQLQDSENELPPEATGQPNYESYSHRLSHIGLISASHVKALVYSWTHRSADRTNTIEPNSITQIPLVKAFNLSSGAAVVRGPGFTGGDILRRTNTGTFGDIRVNINPPFAQRYRVRIRYASTTDLQFHTSINGKAINQGNFSATMNRGEDLDYKTFRTVGFTTPFSFLDVQSTFTIGAWNFSSGNEVYIDRIEFVPVEVTYEAEYDFEKAQEKVTALFTSTNPRGLKTDVKDYHIDQVSNLVESLSDEFYLDEKRELFEIVKYAKQLHIERNM

SEQ ID NO: 202 - protein, 719 aa, Bacillus thuringiensis
MKLKNQDKHQSFSSNAKVDKISTDSLKNETDIELQNINHEDCLKMSEYENVEPFVSASTIQTGIGIAGKILGTLGVPFAGQVASLYSFILGELWPKGKNQWEIFMEHVEEIINQKISTYARNKALTDLKGLGDALAVYHDSLESWVGNRNNTRARSVVKSQYIALELMFVQKLPSFAVSGEEVPLLPIYAQAANLHLLLLRDASIFGKEWGLSSSEISTFYNRQVERAGDYSDHCVKWYSTGLNNLRGTNAESWVRYNQFRRDMTLMVLDLVALFPSYDTQMYPIKTTAQLTREVYTDAIGTVHPHPSFTSTTWYNNNAPSFSAIEAAVVRNPHLLDFLEQVTIYSLLSRWSNTQYMNMWGGHKLEFRTIGGTLNISTQGSTNTSINPVTLPFTSRDVYRTESLAGLNLFLTQPVNGVPRVDFHWKFVTHPIASDNFYYPGYAGIGTQLQDSENELPPEATGQPNYESYSHRLSHIGLISASHVKALVYSWTHRSADRTNTIEPNSITQIPLVNAFNLSSGAAVVRGPGFTGGDILRRTNTGTFGDIRVNINPPFAQRYRVRIRYASTTDLQFHTSISGKAINQGNFSATMNRGEDLDYKTSRTVGFTTPFSFLDVQSTFTIGAWNFSSGNEVYIDRIEFVPVEVTYEAEYDFEKAQEKVTALFTSTNPRGLKTDVKDYHIDQVSNLVESLSDEFYLDEKRELFEIVKYAKQLHIERNM

SEQ ID NO: 203 - protein, 719 aa, Bacillus thuringiensis; identical to SEQ ID NO: 199

SEQ ID NO: 204 - protein, 719 aa, Bacillus thuringiensis E-1B
MKLKNQDKHQSFSSNAKVDKISTDSLKNETDIELQNINHEDCLKMSEYENVEPFVSASTIQTGIGIAGKILGTLGVPFAGQVASLYSFILGELWPKGKNQWEIFMEHVEEIINQKISTYARNKALTDLKGLGDALAVYHDSLESWVGNRNNTRARSVVKSQYIALELMVVQKLPSFAVSGEEVPLLPIYAQAANLHLLLLRDASIFGKEWGLSSSEISTFYNRQVERAGDYSDHCVKWYSTGLNNLRGTNAESWVRYNQFRRDMTLMVLDLVALFPSYDTQMYPIKTTAQLTREVYTDAIGTVHPHPSFTSTTWYNNNAPSFSAIEAAVVRNPHLLDFLEQVTIYSLLSRWSNTQYMNMWGGHKLEFRTIGGTLNISTQGSTNTSINPVTLPFTSRDVYRTESLAGLNLFLTQPVNGVPRVDFHWKFVTHPIASDNFYYPGYAGIGTQLQDSENELPPEATGQPNYESYSHRLSHIGLISASHVKALVYSWTHRSADRTNTIEPNSITQIPLVKAFNLSSGAAVVRGPGFTGGDILRRTNTGTFGDIRVNINPPFAQRYRVRIRYASTTDLQFHTSINGKAINQGNFSATMNRGEDLDYKTFRTVGFTTPFSFLDVQSTFTIGAWNFSSGNEVYIDRIEFVPVEVTYEAEYVNEKAQEKVTALFTSTNPRGLKTDVKDYHIDQVSNLVESLSDEFYLDEKRELFEIVKYANELHIERNM

SEQ ID NO: 205 - protein, 719 aa, Bacillus thuringiensis E-1A
MKLKNQDKHQSFSSNAKLDKISTDSLKNETDIELQNINHEDCLKMSEYENVEPFVSASTIQTGIGIAGKILGTLGVPFAGQVASLYSFILGELWPKGKNQWEIFMEHVEEIINQKISTYARNKALTDLKGLGDALAVYHDSLESWVGNRNNTRARSVVKSQYIALELMFVQKLPSFAVSGEEVPLLPIYAQAANLHLLLLRDASIFGKEWGLSSSEISTFYNRQVERAGDYSDHCVKWYSTGLNNLRGTNAESWVRYNQFRRDMTLMVLDLVALFPSYDTQMYPIKTTAQLTREVYTDAIGTVHPHPSFTSTTWYNNNAPSFSAIEAAVVRNPHLLDFLEQVTIYSLLSRWSNTQYMNMWGGHKLEFRTIGGTLNISTQGSTNTSINPVTLPFTSRDVYRTESLAGLNLFLTQPVNGVPRVDFHWKFVTHPIASDNFYYPGYAGIGTQLQDSENELPPEATGQPNYESYSHRLSHIGLISASHVKALVYSWTHRSADRTNTIEPNSITQIPLVKAFNLSSGAAVVRGPGFTGGDILRRTNTGTFGDIRVNINPPFAQRYRVRIRYASTTDLQFHTSINGKAINQGNFSATMNRGEDLDYKTFRTVGFTTPFSFLDVQSTFTIGAWNFSSGNEVYIDRIEFVPVEVTYEAEYDFEKAQEKVTALFTSTNPRGLKTDVKDYHIDQVSNLVESLSDEFYLDEKRELFEIVKYGKGLHIERNM

SEQ ID NO: 206 - protein, 719 aa, Bacillus thuringiensis MX2
MKLKNPDKHQSFSSNAKVDKISTDSLKNETDIELQNINHEDCLKMSEYENVEPFVSASTIQTGIGIAGKILGTLGVPFAGQVASLYSFILGELWPKGKNQWEIFMEHVEEIINQKISTYARNKALTDLKGLGDALAVYHDSLESWVGNRNNTRARSVVKSQYIALELMFVQKLPSFAVSGEEVPLLPIYAQAANLHLLLLRDASIFGKEWGLSSSEISTFYNRQVERAGDYSDHCVKWYSTGLNNLRGTNAESWVRYNQFRRDMTLMVLDLVALFPSYDTQMYPIKTTAQLTREVYTDAIGTVHPHPSFTSTTWYNNNAPSFSAIEAAVVRNPHLLDFLEQVTIYSLLSRWSNTQYMNMWGGHKLEFRTIGGTLNISTQGSTNTSINPVTLPFTSRDVYRTESLAGLNLFLTQPVNGVPRVDFHWKFVTHPIASDNFYYPGYAGIGTQLQDSENELPPEATGQPNYESYSHRLSHIGLISASHVKALVYSWTHRSADRTNTIEPNSITQIPLVKAFNLSSGAAVVRGPGFTGGDILRRTNTGTFGDIRVNINPPFAQRYRVRIRYASTTDLQFHTSINGKAINQGNFSATMNRGEDLDYKTFRTVGFTTPFSFLDVQSTFTIGAWNFSSGNEVYIDRIEFVPVEVTYEAVYDFEKAQEKVTALFTSTNPRGLKTDVKDHHIDQVSNLVESLSDEFYLDEKRELFEIVKYAKQLHIERNM

SEQ ID NO: 207 - protein, 705 aa, Bacillus thuringiensis MX9
MKLKNPDKHQSLSSNAKVDKIATDSLKNETDIELKNMNNEDYLRMSEHESIDPFVSASTIQTGIGIAGKILGTLGVPFAGQIASLYSFILGELWPKGKSQWEIFMEHVEEIINQKILTYARNKALSDLRGLGDALAVYHESLESWVKNRNNTRARSVVKNQYIALELMFVQKLPSFAVSGEEVPLLPIYAQAANLHLLLLRDASIFGKEWGLSASEISTFYNRQVERTRDYSDHCVKWYNTGLNNLRGTNAKSWVRYNQFRKDMTLMVLDLVALFPSYDTLVYPIKTTSQLTREVYTDAIGTVHPNQAFASTTWYNNNAPSFSAIEAAVIRSPHLLDFLEKVTIYSLLSRWSNTQYMNMWGGHRLESRPIGGALNTSTQGSTNTSINPVTLQFTSRDVYRTESWAGLNLFLTQPVNGVPRVDFHWKFPTLPIASDNFYYLGYAGVGTQLQDSENELPPETTGQPNYESYSHRLSHIGLISASHVKALVYSWTHRSADRTNTIEPNSITQIPLVKAFNLPSGAAVVRGPGFTGGDILRRTNTGTFGDIRVNINPPFAQRYRVRIRYASTTDVQFHTSINGKAINQGNFSATMNRGEDLDYKTFRTVGFTTPFSLSDVQSTFTIGAWNFSSGNEVYIDRIEFVPVEVTYEAEHDFEKAQEEVTALFTSTNPGGLKTNVTEYHIDQVSNLVESLSMNSISMKRENYSR

SEQ ID NO: 208 - protein, 719 aa, Bacillus thuringiensis kurstaki; identical to SEQ ID NO: 199

SEQ ID NO: 209 - protein, 719 aa, Bacillus thuringiensis kurstaki HD1
MKLKNQDKHQSFSSNAKVDKISTDSLKNETDIELQNINHEDCLKMSEYENVEPFVSASTIQTGIGIAGKILGTLGVPFAGQVASLYSFILGELWPKGKNQWEIFMEHVEEIINQKISTYARNKALTDLKGLGDALAVYHDSLESWVGNRNNTRARSVVKSQYIALELMFVQKLPSFAVSGEEVPLLPIYAQAANLHLLLLRDASIFGKEWGLSSSEISTFYNRQVERAGDYSYHCVKWYSTGLNNLRGTNAESWVRYNQFRRDMTLMVLDLVALFPSYDTQMYPIKTTAQLTREVYTDAIGTVHPHPSFTSTTWYNNNAPSFSAIEAAVVRNPHLLDFLEQVTIYSLLSRWSNTQYMNMWGGHKLEFRTIGGTLNISTQGSTNTSINPVTLPFTSRDVYRTESLAGLNLFLTQPVNGVPRVDFHWKFVTHPIASDNFYYPGYAGIGTQLQDSENELPPEATGQPNYESYSHRLSHIGLISASHVKALVYSWTHRSADRTNTIEPNSITQIPLVKAFNLSSGAAVVRGPGFTGGDILRRTNTGTFGDIRVNINPPFAQRYRVRIRYASTTDLQFHTSINGKAINQGNFSATMNRGEDLDYKTFRTVGFTTPFSFLDVQSTFTIGAWNFSSGNEVYIDRIEFVPVEVTYEAEYDFEKAQEKVTALFTSTNPRGLKTDVKDYHIDQVSNLVESLSDEFYLDEKRELFEIVKYANELHIERNM

SEQ ID NO: 210 - protein, 719 aa, Bacillus thuringiensis AB88
MKLKNQDKHQSFSSNAKVDKISTDSLKNETDIELQNINHEDCLKMSEYENVEPFVSASTIQTGIGIAGKILGTLGVPFAGQVASLYSFILGELWPKGKNQWEIFMEHVEEIINQKISTYARNKALTDLKGLGDALAVYHDSLESWVGNRNNTRARSVVKSQYIALELMFVQKLPSFAVSGEEVPLLPIYAQAANLHLLLLRDASIFGKEWGLSSSEISTFYNRQVERAGDYSDHCVKWYSTGLNNLRGTNAESWVRYNQFRRDMTLMVLDLVALFPSYDTQMYPIKTTAQLTREVYTDAIGTVHPHPSFTSTTWYNNNAPSFSAIEAAVVRNPHLLDFLEQVTIYSLLSRWSNTQYMNMWGGHKLEFRTIGGTLNISTQGSTNTSINPVTLPFTSRDVYRTESLAGLNLFLTQPVNGVPRVDFHWKFVTHPIASDNFYYPGYVGIGTQLQDSENELPPEATGQPNYESYSHRLSHIGLISASHVKALVYSWTHRSADRTNTIEPNSITQIPLVKAFNLSSGAAVVRGPGFTGGDILRRTNTGTFGDIRVNINPPFAQRYRVRIRYASTTDLQFHTSINGKAINQGNFSATMNRGEDLDYKTFRTVGFTTPFSFLDVQSTFTIGAWNFSSGNEVYIDRIEFVPVEVTYEAEYDFEKAQEKVTALFTSTNPRGLKTDVKDYHIDQVSNLVESLSDEFYLDEKRELFEIVKYAKQLHIERNM

SEQ ID NO: 211 - protein, 719 aa, Bacillus thuringiensis 61
MKLKNQDKHQSFSSNAKVDKISTDSLKNETDIELQNINHEDCLKMSEYENVEPFVSASTIQTGIGIAGKILGTLGVPFAGQVASLYSFILGELWPKGKNQWEIFMEHVEEIINQKISTYARNKALTDLKGLGDALAVYHDSLESWVGNRNNTRARSVVRSQYIALELMFVQKLPSFAVSGEEVPLLPIYAQAANLHLLLLRDASIFGKEWGLSSSEISTFYNRQVERAGDYSDHCVKWYSTGLNNLRGTNAESWVRYNQFRRDMTLMVLDLVALFPSYDTQMYPIKTTAQLTREVYTDAIGTVHPHPSFTSTTWYNNNAPSFSAIEAAVVRNPHLLDFLEQVTIYSLLSRWSNTQYMNMWGGHKLEFRTIGGTLNISTQGSTNTSINPVTLPFTSRDVYRTESLAGLNLFLTQPVNGVPRVDFHWKFVTHPIASDNFYYPGYAGIGTQLQDSENELPPEATGQPNYESYSHRLSHIGLISASHVKALVYSWTHRSADRTNTIEPNSITQIPLVKAFNLSSGAAVVRGPGFTGGDILRRTNTGTFGDIRVNINPPFAQRYRVRIRYASTTDLQFHTSINGKAINQGNFSATMNRGEDLDYKTFRTVGFTTPFSFLDVQSTFTIGAWNFSSGNEVYIDRIEFVPVEVTYEAEYDFEKAQEKVTALFTSTNPRGLKTDVKDYHIDQVSNLVESLSDEFYLDEKRELFEIVKYANELHIERNM

SEQ ID NO: 212 - protein, 719 aa, Bacillus thuringiensis kurstaki S101
MKLKNQDKHQSFSSNAKVDKISTDSLKNETDIELQNINHEDCLKMSEYENVEPFVSASTIQTGIGIAGKILGTLGVPFAGQVASLYSFILGELWPKGKNQWEIFMEHVEEIINQKISTYARNKALTDLKGLGDALAVYHDSLESWVGNRNNTRARSVVKSQYIALELMFVQKLPSFAVSGEEVPLLPIYAQAANLHLLLLRDASIFGKEWGLSSSEISTFYNRQVERAGDYSDHCVKWYSTGLNNLRGTNAESWVRYNQFRRDMTLMVLDLVALFPSYDTQMYPIKTTAQLTREVYTDAIGTVHPHPSFTSTTWYNNNAPSFSAIEAAVVRNPHLLDFLEQVTIYSLLSRWSNTQYMNMWGGHKLEFRTIGGTLNISTQGSTNTSINPVTLPFTSRDVYRTESLAGLNLFLTQPVNGVPRVDFHWKFVTHPIASDNFYYPGYAGIGTQLQDSENELPPEATGQPNYESYSHRLSHIGLISASHVKALVYSWTHRSADRTNTIEPNSITQIPLVKAFNLSSGAAVVRGPGFTGGDILRRTNTGTFGDIRVNIKPPFAQRYRVRIRYASTTDLQFHTSINGKAINQGNFSATMNRGEDLDYKTFRTVGFTTPFSFLDVQSTFTIGAWNFSSGNEVYIDRIEFVPVEVTYEAEYDFEKAQEKVTALFTSTNPRGLKTDVKDYHIDQVSNLVESLSDEFYLDEKRELFEIVKYAKQLHIERNM

SEQ ID NO: 213 - protein, 719 aa, Bacillus thuringiensis
MKLKNPDKHQSFSSNAKVDKISTDSLKNETDIELQNINHEDCLKISEYENVEPFVSASTIQTGISIAGKILGTLGVPFAGQVASLYSFILGELWPKGKNQWEIFMEHVEEIINQKISTYARNKALTDLKGLGDALAVYHESLESWVGNRKNTRARSVVKSQYIALELMFVQKLPSFAVSGEEVPLLPIYAQAANLHLLLLRDASIFGKEWGLSSSEISTFYNRQVERAGDYSDHCVKWYSTGLNNLRGTNAESWVRYNQFRKDMTLMVLDLVALFPSYDTLVYPIKTTSQLTREVYTDAIGTVHPNASFASTTWYNNNAPSFSTIESAVVRNPHLLDFLEQVTIYSLLSRWSNTQYMNMWGGHRLEFRTIGGMLNTSTQGSTNTSINPVTLPFTSRDVYRTESLAGLNLFLTQPVNGVPRVDFHWKFVTHPIASDNFYYPGYAGIGTQLQDSENELPPETTGQPNYESYSHRLSHIGLISASHVKALVYSWTHRSADRTNTIEPNSITQIPLVKAFNLSSGAAVVRGPGFTGGDILRRTNTGTFGDIRVNINPPFAQRYRVRIRYASTTDIQFHTSINGKAINQGNFSATMNRGEDLDYKTFRTVGFTTPFSFSDVQSTFTIGAWNFSSGNEVYIDRIEFVPVEVTYEAEYDFEKAQEKVTALFTSTNPGGLKTNVTEYHIDQVSNLVESLSNEFYLDEKRELFEIVKYAKQLHTGRNM

SEQ ID NO: 214 - protein, 719 aa, Bacillus thuringiensis
MKLKNQDKHQSFSSNAKVDKISTDSLKNETDIELQNINHEDCLKMSEYENVEPFVSASTIQTGIGIAGKILGTLGVPFAGQVASLYSFILGELWPKGKNQWEIFMEHVEEIINQKISTYARNKALTDLKGLGDALAVYHDSLESWVGNRNNTRARSVVKSQYIALELMFVQKLPSFAVSGEEVPLLPIYAQAANLHLLLLRDASIFGKEWGLSSSEISTFYNRQVERAGDYSDHCVKWYSTGLNNLRGTNAESWVRYNQFRRDMTLMVLDLVALFPSYDTQMYPIKTTAQLTREVYTDAIGTVHPHPSFTSTTWYNNNAPSFSAIEAAVVRNPHLLDFLEQVTIYSLLSRWSNTQYMNMWGGHKLEFRTIGGTLNISTQGSTNTSINPVTLPFTSRDVYRTESLAGLNLFLTHPVNGVPRVDFHWKFVTHPIASDNFYYPGYAGIGTQLQDSENELPPEATGQPNYESYSHRLSHIGLISASHVKALVYSWTHRSADRTNTIEPNSITQIPLVKAFNLSSGAAVVRGPGFTGGDILRRTNTGTFGDIRVNINPPFAQRYRVRIRYASTTDLQFHTSINGKAINQGNFSATMNRGEDLDYKTFRTVGFTTPFSFLDVQSTFTIGAWNFSSGNEVYIDRIEFVPVEVTYEAEYDFEKAQEKVTALFTSTNPRGLKTDVKDYHIDQVSNLVESLSDEFYLDEKRELFEIVKYAKQLHIERNM

SEQ ID NO: 215 - protein, 720 aa, Bacillus thuringiensis Ly30
MKLKNPDKHQSFSSNAKVDKISTDSLKNETDIELQNINHEDCLKMSEYENVEPFVSASTIQTGIGIAGKILGTLGVPFAGQVASLYSFILGELWPKGKNQWEIFMEHVEEIINQKISTYARNKALTDLKGLGDALAVYHDSLESWVGNRNNTRARSVVKSQYIALELMFVQKLPSFAVSGEEVPLLPIYAQAANLHLLLLRDASIFGKEWGLSSSEISTFYNRQVERAGDYSDHCVKWYSTGLNNLRGTNAESWVRYNQFRRDMTLMVLDLVALFPSYDTQMYPIKTTAQLTREVYTDAIGTVHPHPSFTSTTWYNNNAPSFSAIEAAVVRNPHLLDFLEQVTIYSLLSRWSNTQYMNMWGGHKLEFRTIGGTLNISTQGSTNTSINPVTLPFTSRDVYRTESLAGLNLFLTQPVNGVPRVDFHWKFVTHPIASDNFYYPGYAGIGTQLQDSENELPPEATGQPNYESYSHRLSHIGLISASHVKALVYSWTHRSADRTNTIEPNSITQIPLVKAFNLSSGAAVVRGPGFTGGDILRRTNTGTFGDIRVNINPPFAQRYRVRIRYASTTDLQFHTSINGKAINQGNFSATMNRGEDLDYKTFRTVGFTTPFSFLDVQSTFTIGAWNFSSGNEVYIDRIEFVPVEVTYEAEYDFEKAQEKVTALFTSTNPRGLKTDVKDYHIDQVSNLVESLSDEFYLDEKRELFEIVKYAKQLHIERNMP

SEQ ID NO: 216 - protein, 719 aa, Bacillus thuringiensis entomocidus BP465
MKLKNPDKHQSLSSNAKVDKIATDSLKNETDIELKNMNNEDYLRMSEHESIDPFVSASTIQTGIGIAGKILGTLGVPFAGQIASLYSFILGELWPKGKSQWEIFMEHVEEIINQKILTYARNKALSDLRGLGDALAVYHESLESWVENRNNTRARSVVKNQYIALELMFVQKLPSFAVSGEEVPLLPIYAQAANLHLLLLRDASIFGKEWGLSASEISTFYNRQVERTRDYSDHCIKWYNTGLNNLRGTNAKSWVRYNQFRKDMTLMVLDLVALFPSYDTLVYPIKTTSQLTREVYTDAIGTVHPNQAFASTTWYNNNAPSFSAIEAAVIRSPHLLDFLEKVTIYSLLSRWSNTQYMNMWGGHRLESRPIGGALNTSTQGSTNTSINPVTLQFTSRDVYRTESLAGLNLFLTQPVNGVPRVDFHWKFPTLPIASDNFYYLGYAGVGTQLQDSENELPPETTGQPNYESYSHRLSHIGLISASHVKALVYSWTHRSADRTNTIEPNSITQIPLVKAFNLSSGAAVVRGPGFTGGDILRRTNTGTFGDIRVNINPPFAQRYRVRIRYASTTDLQFHTSINGKAINQGNFSATMNRGEDLDYKTFRTIGFTTPFSFSDVQSTFTIGAWNFSSGNEVYIDRIEFVPVEVTYEAEYDFEKAQEKVTALFTSTNPRGLKTDVKDYHIDQVSNLVESLSDEFYLDEKRELFEIVKYAKQIHIERNM

SEQ ID NO: 217 - protein, 719 aa, Bacillus thuringiensis PP61
MKLKNPDKHQSLSSNAKVDKIATDSLKNETDIELKNMNNEDYLRMSEHESIDPFVRASTIQTGIGIAGKILGTLGVPFAGQIASLYSFILGELWPKGKSQWEIFMEHVEEIINQKILTYARNKAPSDLRGLGDALAVYHESLESWVENRNNTRARSVVKNQYIALELMFVQKLPSFAVSGEEVPLLPIYAQAANLHLLLLRDASIFGKEWGLSASEISTFYNRQVERTRDYSDHCIKWYNTGLNNLRGTNAKSWVRYNQFRKDMTLMVLDLVALFPSYDTLVYPIKTTSQLTREVYTDAIGTVHPNQAFASTTWYNNNAPSFSAIEAAVIRSPHLLDFLEKVTIYSLLSRWSNTQYMNMWGGHRLESRPIGGALNTSTQGSTNTSINPVTLQFTSRDVYRTESWAGLNLFLTQPVNGVPRVDFHWKFPTLPIASDNFYYLGYAGVGTQLQDSENELPPETTGQPNYESYSHRLSHIGLISASHVKALVYSWTHRSADRTNTIEPNSITQIPLVKAFNLSSGAAVVRGPGFTGGDILRRTNTGTFGDIRVNINPPFAQRYRVRIRYASTTDLQFHTSINGKAINQGKFSATMNRGEDLDYKTFRTVGFTTPFGFSDVQSTFTIGAWNFSSGNEVYIDRIEFVPVEVTYEAEYDFEKAQEKVTALFTSTNPRGLKTDVKDYHIDQVSNLVESLSDEFYLDEKRELFEIVKYAKQIHIERNM

SEQ ID NO: 218 - protein, 719 aa, Bacillus thuringiensis GS8
MKLKNQDKHQSLSSNAKVDKIATDSLKNETDIELKNMNNEDYLRMSEHESIDPFVSASTIQTGIGIAGKILGTLGVPFAGQIASLYSFILGELWPKGKSQWEIFMEHVEEIINQKILTYARNKALSDLRGLGDALAVYHESLESWVENRNNTRARSVVKNQYIALELMFVQKLPSFAVSGEEVPLLPIYAQAANLHLLLLRDASIFGKEWGLSASEISTFYNRQVERTRDYSDHCIKWYNTGLNNLRGTNAKSWVRYNQFRKDMTLMVLDLVALFPSYDTLVYPIKTTSQLTREVYTDAIGTVHPNQAFASTTWYNNNAPSFSAIEAAVIRSPHLLDFLEKVTIYSLLSRWSNTQYMNMWGGHRLESRPIGGALNTSTQGSTNTSINPVTLQFTSRDVYRTESWAGLNLFLTQPVNGVPRVDFHWKFPTLPIASDNFYYLGYAGVGTQLQDSENELPPETTGQPNYESYSHRLSHIGLISASHVKALVYSWTHRSADRTNTIEPNSITQIPLVKAFNLSSGAAVVRGPGFTGGDILRRTNTGTFGDIRVNINPPFAQRYRVRIRYASTTDLQFHTSINGKAINQGNFSATMNRGEDLDYKTFRTVGFTTPFSFSDVQSTFTIGAWNFSSGNEVYIDRIEFVPVEVTYEAEYDFEKAQEKVTALFTSTNPRGLKTDVKDYHIDQVSNLVESLSDEFYLDEKRELFEIVKYAKQIHIERNM

SEQ ID NO: 219 - protein, 719 aa, Bacillus thuringiensis BF-4
MKLKNPDKHQSLSSNAKVDKIATDSLKNETDIELKNINHEDFLRMSEHESIDPFVSASTIQTGIGIAGKILGTLGVPFAGQIASLYSFILGELWPKGKSQWEIFMEHVEELIDQKISTYARNIALADLKGLGDALAVYHESLESWIKNRNNARARSVVKNQYIALELMFVQKLPSFAVSGEEVPLLPIYAQAANLHLLLLRDASIFGKEWGLSASEISTFYNRQVERTRDYSDHCIKWYNTGLNNLRGTNAKSWVRYNQFRKDMTLMVLDLVALFPSYDTLVYPIKTTSQLTREVYTDAIGTVHPNQAFASTTWYNNNAPSFSAIEAAVIRSPHLLDFLEKVTIYSLLSRWSNTQYMNMWGGHRLESRPIGGALNTSTQGSTNTSINPVTLQFTSRDVYRTESWAGLNLFLTQPVNGVPRVDFHWKFPTLPIASDNFYYLGYAGVGTQLQDSENELPPETTGQPNYESYSHRLSHIGLISASHVKALVYSWTHRSADRTNTIEPNSITQIPLVKAFNLSSGAAVVRGPGFTGGDILRRTNTGTFGDIRVNINPPFAQRYRVRIRYASTTDLQFHTSINGKAINQGNFSATMNRGEDLDYKTFRTVGFTTPFSFSDVQSTFTIGAWNFSSGNEVYIDRIEFVPVEVTYEAEYDFEKAQEKVTALFTSTNPRGLKTDVKDYHIDQVSNLVESLSDEFYLDEKRELFEIVKYAKQIHIERNM

SEQ ID NO: 220 - protein, 702 aa, Bacillus thuringiensis LB52
MKLKNPDKHQSLSSNAKVDKIATDSLKNETDIELKNMNNEDYLRMSEHESIDPFVSASTIQTGIGIAGKILGTLGVPFAGQIASLYSFILGELWPKGKSQWEIFMEHVEEIINQKILTYARNKALSDLRGLGDALAVYHESLESWVKNRNNTRARSVVKNQYIALELMFVQKLPSFAVSGEEVPLLPIYAQAANLHLLLLRDASIFGKEWGLSASEISTFYNRQVERTRDYSDHCVKWYNTGLNNLRGTNAKSWVRYNQFRKDMTLMVLDLVALFPSYDTLVYPIKTTSQLTREVYTDAIGTVHPNQAFASTTWYNNNAPSFSAIEAAVIRSPHLLDFLEKVTIYSLLSRWSNTQYMNMWGGHRLESRPIGGALNTSTQGSTNTSINPVTLQFTSRDVYRTESWAGLNLFLTQPVNGVPRVDFHWKFPTLPIASDNFYYLGYAGVGTQLQDSENELPPETTGQPNYESYSHRLSHIGLISASHVKALVYSWTHRSADRTNTIEPNSITQIPLVKAFNLPSGAAVVRGPGFTGGDILRRTNTGTFGDIRVNINPPFAQRYRVRIRYASTTDVQFHTSINGKAINQGNFSATMNRGEDLDYKTFRTVGFTTPFSLSDVQSTFTIGAWNFSSGNEVYIDRIEFVPVEVTYEAEHDFEKAQEEVTALFTSTNPGGLKTNVTEYHIDQVSNLVESLSMNSISMKREN

SEQ ID NO: 221 - protein, 719 aa, Bacillus thuringiensis C18
MKLKNPDKHQTLSSNAKVDKIATDSLKNETDIELKNMNNEDYLRMSEHESIDPFVSASTIQTGIGIAGKILGTLGVPFPGQIASLYSFILGELWPKGKSQWEIFMEHVEAIINRKISTYARNKALTDLKGLGDALAVYHESLESWVGNRNNTRARSVVKNQYIALELMFVQKLPSFAVSGEEVPLLPIYAQAANLHLLLLRDASIFEKNGGLSASEISTFYNRQVERTRDYSYHCVKWNNTGLNNLRATNGQSWVRYNQFRKDIELMVLDLVRVFPSYDTLVYPIKTTSQLTREVYTDAIGTVDPNQALRSTTWYNNNAPSFSAIEAAVIRSPHLLDFLEKVTIYSLLSRWSNTQYMNMWGGHRLESRPIGGALNTSTQGSTNTSINPVTLQFTSRDFYRTESWAGLNLFLTQPVNGVPRVDFHWKFPTLPIASDNFYYLGYAGVGTQLQDSENELPPETTGQPNYESYSHRLSHIGLISGSHVKALVYSWTHRSADRTNTIEPNSITQIPLVKAFNLSSGAAVVRGPGFTGGHILRRTKSGTFGHIRVNINPPFAQRYRVRMSYASTTDLQFHTSINGKAINQGNFSATMNRGEDLDYKTFRTVGFTTPFSFSDVQSTFTIGAWNFSSGNEVYIGRIEFVPVEVTYEAEYDFEKAQEKVTALFTSTNPRGLKTDVKDYHIDQVSNLVESLSDELYLDEKRELFEIVKYAKQIHIERNM

SEQ ID NO: 222 - protein, 719 aa, Bacillus thuringiensis
MKSKNQNMYRSFSSNATVDKSFTDPLEHNTNMELQNSNHEDCLKMSEYESVEPFVSVSTIQTGIGIAGKILGNLGVPFAGQVASLYSFILGELWPKGKSQWEIFMEHVEELINQKISTYARNKALADLKGLGDALAVYHESLESWIENRNNTRVRSVVKNQYIALELMFVQKLPSFAVSGEEVPLLPIYAQAANLHLLLLRDASIFGKEWGLSESEISTFYNRQSSQTQEYSDYCSEWYNTGLNRLRGTNAESWVRYNQFRRDMTLMVLDLVALFPSYDTRMYPIPTSAQLTREVYTDAIGTVHPNASFASTTWYNNNAPSFSTIEAAVVRNPHLLDFLEQVTIYSLLSRWSNTQYMNMWGGHKLEFRTIGGTLNTSTQGSTNTSINPVTLPFTSRDVYRTESLAGLNLFLTQPVNGVPRVDFHWKFVTHPIASDNFYYPGYAGIGTQLQDSENELPPETTGQPNYESYSHRLSHIGLISASHVKALVYSWTHRSADRTNTINSDSITQIPLVKAFNLPSGASVVRGPGFTGGDILQRTNTGTFGDIRVNINPPFAQRYRLRIRYASTTNLEFHTSINGKAINQGNFSATMNRGEDLDYKAFRTVGFTTPFSFSNAQSTFTIGAWNFSLGNEVYIDRIEFVPVEVTYEAEYDLKKAQDEITAMFTSTNLRRLKTNVTDCHIDQVSNLVESLSDEFYLDEKRELFEIVKYAKQLNIERNM

SEQ ID NO: 223 - protein, 719 aa, Bacillus thuringiensis BTC007
MKLKNPDKHQSLSSNAKVDKIATDSLKNETDIELKNINHEDFLRMSEHESIDPFVSASTIQTGIGIAGKILGTLGVPFAGQIASLYSFILGELWPKGKSQWEIFMEHVEELIDQKISTYARNIALADLKGLGDALAVYHESLESWIKNRNNARATSVVKSQYIALELLFVQKLPSFAVSGEEVPLLPIYAQAANLHLLLLRDASVFGKEWGLSNSQISTFYNRQVERTSDYSDHCVKWYSTGLNNLRGTNAESWVRYNQFRKDMTLMVLDLIALFPSYDTLVYPIKTTSQLTREVYTDAIGTVHPNASFASTTWYNNNAPSFSAIESAVVRNPHLLDFLEQVTIYSLLSRWSNTQYMNMWGGHRLEFRTIGGVLNTSTQGSTNTSINPVTLPFTSRDVYRTESLAGLNLFLTQPVNGVPRVDFHWKFATLPIASDNFYYLGYAGVGTQLQDSENELPPETTGQPNYESYSHRLSHIGLISASHVKALVYSWTHRSADRTNTIEPNSITQIPLVKAFNLSSGAAVVRGPGFTGGDILRRTNTGTFGDIRVNINPPFAQRYRVRIRYASTTDLQFHTSINGKAINQGNFSATMNRGEDLDYKTFRTVGFTTPFSFSDVQSTFTIGAWNFSSGNEVYIDRIEFVPVEVTYEAEYDFEKAQEKVTALFTSTNPRGLKTDVKDYHIDQVSNLVESLSDEFYLDEKRELFEIVKYAKQIHIERNM

SEQ ID NO: 224 - protein, 710 aa, Bacillus thuringiensis
  MISC_FEATURE (200)..(200): Xaa is Ala, Arg, Asn, Asp, Asx, Cys, Glu, Gln, Glx, Gly, His, Ile, Leu, Lys, Met, Phe, Pro, Ser, Thr, Trp, Tyr, or Val.
MKSKNQNMHQSLSNNATVDKNFTGSLENNTNTELQNFNHEGIEPFVSVSTIQTGIGIAGKILGNLGVPFAGQVASLYSFILGELWPKGKSQWEIFMEHVEELINQKISTYARNKALADLKGLGDALAVYHESLESWIENRNNTRTRSVVKSQYITLELMFVQSLPSFAVSGEEVPLLPIYAQAANLHLLLLRDASIFGKXWGLSDSEISTFYNRQSGKSKEYSDHCVKWYNTGLNRLMGNNAESWVRYNQFRRDMTLMVLDLVALFPSYDTQMYPIKTTAQLTREVYTDAIGTVHPHPSFTSTTWYNNNAPSFSTIEAAVVRNPHLLDFLEQVTIYSLLSRWSNTQYMNMWGGHKLEFRTIGGTLNTSTQGSTNTSINPVTLPFTSRDVYRTESLAGLNLFLTQPVNGVPRVDFHWKFVTHPIASDNFYYPGYAGIGTQLQDSENELPPEATGQPNYESYSHRLSHIGLISASHVKALVYSWTHRSADRTNTIEPNSITQIPLVKAFNLSSGAAVVRGPGFTGGDILRRKNTGTFGDIRVNINPPFAQRYRVRIRYASTTDLQFHTSINGKAINQGNFSATMNRGEDLDYKTFRTVGFTTPFSFSDVQSTFTIGAWNFSSGNEVYIDRIEFVPVEVTYEAEYDFEKAQEEVTALFTSTNPRGLKTDVKDYHIDQVSNLVESLSDKFYLDEKRELFEIVKYAKQLHIERNM

SEQ ID NO: 225 - protein, 381 aa, Bacillus thuringiensis ly4a3
RDVIVIVLDLVALFPSYDTQMYPIKTTAQLTREVYTDAIGTVHPHPSFTSTTWYNNNAPSFSAIEAAVVRNPHLLDFLEQVTIYSLLSRWSNTQYMNMWGGHKLEFRTIGGTLNISTQGSTNTSINPVTLPFTSRDVYRTESLAGLNLFLTQPVNGVPRVDFHWKFVTHPIASDNFYYPGYAGIGTQLQDSENELPPEATGQPNYESYSHRLSHIGLISASHVKALVYSWTHRSADRTNTIEPNSITQIPLVKAFNLSSGAAVVRGPGFTGGDILRRTNTGTFGDIRVNINPPFAQRYRVRIRYASTTDLQFHTSINGKAINQGNFSATMNRGEDLDYKTFRTVGFTTPFSFLDVQSTFTIGAWNFSSGNEVYIDKIEFIP

SEQ ID NO: 226 - protein, 1167 aa, Bacillus thuringiensis EG5847
MEINNQKQCIPYNCLSNPEEVLLDGERILPDIDPLEVSLSLLQFLLNNFVPGGGFISGLVDKIWGALRPSEWDLFLAQIERLIDQRIEATVRAKAITELEGLGRNYQIYAEAFKEWESDPDNEAAKSRVIDRFRILDGLIEANIPSFRIIGFEVPLLSVYVQAANLHLALLRDSVIFGERWGLTTKNVNDIYNRQIREIHEYSNHCVDTYNTELERLGFRSIAQWRIYNQFRRELTLTVLDIVALFPNYDSRLYPIQTFSQLTREIVTSPVSEFYYGVINSGNIIGTLTEQQIRRPHLMDFFNSMIMYTSDNRREHYWSGLEMTAYFTGFAGAQVSFPLVGTRGESAPPLTVRSVNDGIYRILSAPFYSAPFLGTIVLGSRGEKFDFALNNISPPPSTIYRHPGTVDSLVSIPPQDNSVPPHRGSSHRLSHVTMRASSPIFHWTHRSATTTNTINPNAIIQIPLVKAFNLHSGATVVRGPGFTGGDILRRTNTGTFADMRVNITGPLSQRYRVRIRYASTTDLQFFTRINGTSVNQGNFQRTMNRGDNLESGNFRTAGFSTPFSFSNAQSTFTLGTQAFSNQEVYIDRIEFVPAEVTFEAESDLERAQKAVNALFTSTNQLGLKTDVTDYQIDQVSNLVECLSDEFCLDEKRELSEKVKHAKRLSDKRNLLQDPNFTSINRQLDRGWRGSTDITIQGGNDVFKENYVTLPGTFDECYPTYLYQKIDESKLKAYTRYELRGYIEDSQDLEVYLIRYNAKHETVNVPGTGSLWPLSVESPIGRCGEPNRCVPHIEWNPDLDCSCRDGEKCAHHSHHFSLDIDVGCTDLNEDLGVWVIFKIKTQDGHARLGNLEFLEEKPLLGEALARVKRAEKKWRDKREQLQFETNIVYKEAKESVDALFVDSHYNRLQADTNITMIHAADKRVHRIREAYLPELSVIPGVNADIFEELEGLIFTAFSLYDARNIIKNGDFNNGLSCWNVKGHVDIQQNDHRSVLVVPEWESEVSQEVRVCPGRGYILRVTAYKEGYGEGCVTIHEIEDNTDELKFSNCIEEEVYPTDTGNDYTAHQGTTGCADACNSRNVGYEDGYEINTTASVNYKPTYEEEMYTDVRRDNHCEYDRGYGNHTPLPAGYVTKELEYFPETDTVWIEIGETEGTFIVDSVELLLMEE

SEQ ID NO: 227 - protein, 1168 aa, Bacillus thuringiensis
MEINNQNQCIPYNCLSNPEEVFLDGERILPDIDPLEVSLSLLQFLLNNFVPGGGFISGLLDKIWGALRPSDWELFLAQIEQLIDRRIERTVRAKAIAELEGLGRSYQLYGEAFKEWEKTPDNTAARSRVTERFRIIDAQIEANIPSFRVSGFEVPLLLVYTQAANLHLALLRDSVVFGERWGLTTTNVNDIYNRQVNRIGEYSKHCVDTYKTELERLGFRSIAQWRIYNQFRRELTLTVLDIVAVFPNYDSRLYPIRTISQLTREIYTSPVSEFYYGVINSNNIIGTLTEQQIRRPHLMDFFNSMIMYTSDNRREHYWSGLEMTATNTEGHQRSFPLAGTIGNSAPPVTVRNNGEGIYRILSEPFYSAPFLGTSVLGSRGEEFAFASNTTTSLPSTIYRNRGTVDSLVSIPPQDYSVPPHRGYSHLLSHVTMRNSSPIFHWTHRSATPRNTIDPDSITQIPAVKGAYIFNSPVITGPGHTGGDIIRFNPNTQNNIRIPFQSNAVQRYRIRMRYAAEADCILESGVNIVTGAGVTFRPIPIKATMTPGSPLTYYSFQYADLNINLTAPIRPNNFVSIRRSNQPGNLYIDRIEFIPIDPIREAEHDLERAQKAVNALFTSSNQLGLKTDVTDYHIDQVSNLVACLSDEFCLDEKRELSEKVKHAKRLSDERNLLQDQNFTGINRQVDRGWRGSTDITIQGGNDVFKENYVTLPGTFDECYPTYLYQKIDESKLKPYTRYELRGYIEDSQDLEVYLIRYNAKHETLNVPGTGSLWPLAAESSIGRCGEPNRCAPHIEWNPELDCSCRDGEKCAHHSHHFSLDIDVGCTDLNEDLGVWVIFKIKTQDGYARLGNLEFLEEKPLLGEALARVKRAEKKWRDKRDKLEWETNIVYKEAKESVDALFVDSQYNRLQTDTNIAMIHVADKRVHRIREAYLPELSVIPGVNAAIFEELEGLIFTAFSLYDARNVIKNGDFNHGLSCWNVKGHVDVEEQNNHRSVLVVPEWEAEVSQEVRVCPGRGYILRVTAYKEGYGEGCVTIHEIEDHTDELKFRNCEEEEVYPNNTVTCNDYPANQEEYRAAETSRNRGYGESYESNSSIPAEYAPIYEKAYTDGRKENSCESNRGYGNYTPLPAGYVTKELEYFPETDKVWIEIGETEGTFIVDSVELLLMEE

SEQ ID NO: 228 - protein, 1168 aa, Bacillus thuringiensis
MEINNQNQCIPYNCLSKPEEVFLDGERILPDIDPLEVSLSLLQFLLNNFVPGGGFISGLIDKIWGALRPSEWELFLAQIEQLIDRRIEATVRAKAIAELEGLGRSYQLYGEAFKEWEKTPDNTAARSRVTERFRIIDAQIEANIPSFRVSGFEVPLLSVYTQAANLHLALLRDSVIFGERWGLSTTNVNDIYNRQVKRIHEYSDHCVDTYKTELERLEFRSIAQWRIYNQFRRELTLTVLDIVALFPNYDGRLYPIRTISQLTREIYTSPVSEFYYGPIYNHNMIGTFIERQLRRPHLMDFFNSMTMYTSDNRREYYWSGLEMTATLTSGNQVSFPLAGTRGNSAPPVSVRKTGEGIYRILSEPFYSAPFLGTSVLGSRGEEFAFASNTTTSLPSTIYRNRGTVDSLVSIPPQDYSVPPHRGYSHLLSHVTMHNSSPIFHWTHRSATPRNIIYPDSITQIPVVKASHLSGGSVIKGPGHTGGDLISLPVNNFTHFRIPFQANTPQRYRIRICYAADSDGTLDSGVFLSAAAGDGFNTTSYRATMSPEGSLTSRDFQFLDLNTSFTSDVASNLWLHFIRYIRPGNLYIDRAEFIPVDATFEAGYNLERAQKAVNALFTSTNQKGLQTDVTDYHIDQVSNLVDCLSDEFCLDEKRKLSEKVKQAKRLSDERNLLQDSNFRGINREQDRGWRGSTDITIQGGNDVFKENYVTLPGTFDACYPTYLYQKVDESKLKAYTRYQLRGYIEDSQDLEVYLIRYNAKYETLNVPGMGSLWPLSVESPIGKCGEPNRCVPQLEWNPDFDCSCRDGEKCAHHSHHFSLDIDVGCTDLNENLGIWVIFKIKTQDGHARLGNLEFLEEKPLLGEALARVKRAEKKWRDKREILQSETNIVYKEAKEAVDGLFVDSQYERLQSDTNIAMIHAADKRVHRIREAYLPELSVIPGVNAAIFEELEGRIFTAYSLYDARNVIKNGDFNNGLSCWNVKGHVDIKQNGHRSVLVIPEWEAQVSQEVRVCPGRGYILRVTANKEGYGEGCVTIHEIENHTEKLKFRNCEEEEVYPNNTGTCNDYTAHQQGTAGCADACNTRNVGYEDAYEMNTTTSVNYKPTYEEEVYTDGRRDNPCEMERGYTPLPVGYVTKELEYFPETNTVWIEIGETEGKFIVDSVELLLMEE

SEQ ID NO: 229 - protein, 1215 aa, Bacillus thuringiensis morrisoni BF190
MNSNRKNENEIINALSIPAVSNHSAQMDLSPDARIEDSLCVAEGNNIDPFVSASTVQTGISIAGRILGVLGVPFAGQLASFYSFLVGELWPSGRDPWEIFMEHVEQIVRQQQITDSVRDTAIARLEGLGRGYRSYQQALETWLDNRNDARSRSIIRERYIALELDITTAIPLFSIRNEEVPLLMVYAQAANLHLLLLRDASLFGSEWGMSSADVNQYYQEQIRYTEEYSNHCVQWYNTGLNRLRGTTAETWVRYNQFRRDLTLGVLDLVALFPSYDTRTYPIPTTAQLTREVYTDPNGVVAGPNNSWFRNGASFSAIENAIIRQPHLYDFLTNLTIYTRRSQVGTTIMNLWAGHRITFNRIQGGSTSEMVYGAITNPVSVSDIPFVNRDVYRTVSLAGGLGSLSGIRYGLTRVDFDMIFRNHPDIVTGLFYHPGHAGIATQVKDSDTELPPETTEQPNYRAFSHLLSHISMGPTTQDVPPVYSWTHQSADRTNTINSDRITQIPLVKAHTLQSGTTVVKGPGFTGGDILRRTSGGPFAFSNVNLDFNLSQRYRARIRYASTTNLRIYVTVAGERIFAGQFDKTMDAGAPLTFQSFSYATINTAFTFPERSSSLTIGADTFSSGNEVYVDRFELIQVTATFEAESDLERARKAVNALFTSTNPRGLKTDVTDYHIDQVSNLVECLSDEFCLDKKRELLEEVKYAKRLSDERNLLQDPTFTSISGQTDRGWIGSTGISIQGGDDIFKENYVRLPGTVDECYPTYLYQKIDESQLKSYTRYQLRGYIEDSQDLEIYLIRYNAKHETLSVPGTESPWPSSGVYPSGRCGEPNRCAPRIEWNPDLDCSCRYGEKCVHHSHHFSLDIDVGCTDLNEDLGVWVIFKIKTQDGHAKLGNLEFIEEKPLLGKALSRVKRAEKKWRDKYEKLQLETKRVYTEAKESVDALFVDSQYDKLQANTNIGIIHGADKQVHRIREPYLSELPVIPSINAAIFEELEGHIFKAYSLYDARNVIKNGDFNNGLSCWNVKGHVDVQQNHHRSVLVLSEWEAEVSQKVRVCPDRGYILRVTAYKEGYGEGCVTIHEFEDNTDVLKFRNFVEEEVYPNNTVTCNDYTTNQSAEGSTDACNSYNRGYEDGYENRYEPNPSAPVNYTPTYEEGMYTDTQGYNHCVSDRGYRNHTPLPAGYVTLELEYFPETEQVWIEIGETEGTFIVGSVELLLMEE

SEQ ID NO: 230 - protein, 1170 aa, Bacillus thuringiensis kurstaki K1
MDNNPKIQECIPYNCLNNPESEILDIEGLSTRSREQVAEISLGLTRFLLENLFPGATFGFGLFDIIWGIFGPDQWSMFLEQIEQLIDQRIETVERNRAIQTLIGLSNSYDVNIEALKEWENNPDNSASQERVRNRFRTTDDALITSIPLLAIPNFEIATLSVYVQAANLHLSLLRVAVFFGERWGLTQINVDDLYRRLTNNIRKYSDHCARWYNEGLDNISGLSRSINFQREVTISVLDIVALFPNYDIRTYPISTTSQLTREIFTSPIVVPNDFSVAYEGVRRAPHLFDFLEKLVIYTGDRSGIRHWAGHEITSRRTDSYHGIIRYPLYGTAANAESPYTLALQPSESIYRTLSEPIFSQTGGLSPHRRRVVEGVEFSIVNNNVNPSSFVYRRKGSLDSFTELPPEDESVPPYIGISHQLCHVGFGRTNVIFEPSNFARVPVFSWTHRSATPTNTIDPDRITQIPSVKASSLRNSTVVSGPGFTGGDIVRMGAVHQIYATDLSMNVRPSVALSRYLIRLRYACRGSSNIVIHGPSIRFVSLPSTMSNDEPLTYQSFRYASITTPITRPIYNMFNLSISRISGVQNLFIDRIEFIPVDANFEAERDLERAQKAVNALFTSTNQRGLKIDVTDYHIDQVSNLVDCLSDEFCLDEKRELSEKVKHAKRLSDERNLLQDLNFKDINRQPERGWSGSTGITIQGGDDVFKENYVTLPGTFDECYPTYLYQKIDESKLKAYTRYQLRGYIEDSQDLEIYLIRYNAKHETVNVPGSGSLWPLSVESSVGKCGEPNRCASRMEWNPDLDCSCRDGEKCAHHSHHFSLDIDVGCTDLNEDLGVWVIFKIKTQDGHAKIGNLEFLKEKLLLGEALARVKKAEKKWRDKRDKLEWETNVVYKEAKESVDALFVDSQYSRLQADTNIAMIHAADKRVHRIREAYLPELTVIPGVNASIFEELEGRIFTAYSLYGARNVIKNGDFNNGLSCWNVKGHVEVQQIHHRSVLVVPSWKTEVSQEVCVCPGRGYILRVTAYKEGYGEGNVTIHEIENNTDELKFRNCEEEEVYPNNTVTCNDYTVNQEEYKGTCTSRNRGYDESYESSSSESAYYASVYEEKGYTDGRRENLCEFNRGYGDYTSLPTAYVTKELEYFPETDKVWIEIGETEGAFILDSVELLLMEE

SEQ ID NO: 231 - protein, 699 aa, Bacillus thuringiensis LBIT 1189
MKPNNQNNHQTLLSNVTVDKPFADALKNETTMELKNSNHEDCLKMSEHESIEPFVSASTIQTGIGIAGKILGSLGVPFAGQVASLYSFILGELWPKGKSQWEIFMEHVEELVAQKISTYARNKALSDLKGLGDALAVYHESLESWIENRNNTRARSVVKNQYIALELMFVQNLPSFAVSGEEVPLLPIYRQAANLHLLLLRDASTFGKEWGLSTSEISTFYNRQSNRTIEYSDYCSKWYNTGLNRLRGTNAESWVRYNQFRRDMTLMVLDLVALFPSYDTHMYPIKTSAQLTREVYTDLNGVVAGPNNSWFKNGASFSAIENAIIRKPHLYDFITNLTIYTRISRANPSYMNLWAGHRITFNRIGSSNSSELVYGAITNPVSTSSLSFVNEDIYRTTSLAGALGTLSGLIYGLTKADFDTRFRNHTNIASGKTYFPGHSGIGTQVRNSETELPPETTEQPSYRAFSHLLSHISMSPTTAATPPVYSWTHQSADRTNTINSDSITQIPLVKANNLHPGAIVVKGPGFTGGDILRRTSTGTFVDLPVNLINWQLSQRYRVRIRYASTTDLQFHTSINGRAINQGNFSATMNRGDALESRTFRTAGFTTPFNFSDAQSTFTISAWNFSSGNEVYIDQIEFIPTEVTFEAEYDSEKAQKAVNDLFTPTNPRGLKADVTDYHIDQVSNLVECLFDEDCHNEKRE

SEQ ID NO: 232 - protein, 753 aa, Bacillus thuringiensis fukuokaensis
MNPYQNNDEIVDVPENYDNNLNRYPYANDPNVAMQNTNYKDWMNGYEEINPSSITAILASIGILNRVIALTGVLGNTQEVISIIQDALGFIRNGTGNELLIHVEQLIQQTLATQYRSAATGAIYGISRSYDNYLMFFRQWERNRTRENGQQVESAFTTINTLCINALAPQASLSRRGFETLLLPNYAMAANFHLLLLRDAVLYRNQWLSNSISTANVNLNILRAAINEYITHCTRWYQDGLNRFDRSSRANMNEWRRFNAYRRDMTLSVLDFATVFPTYDPVLFPAATNVELTRVVYTDPIVMAGGRTAIPGFTRMENLVNSASRVSFLNQMNIYTSFYFRPHNIPRYYWSGNQNFLSNGTSNLYGYRSDGRTTFNVSNIDIFRVNMTTHIGGAFTDDYRGLHRAEFIGANTQNNQRTSLLYSVEIPSSHFRFENHTVFLPGESGLEPNERNYTHRLFQMMNEVSVNPNARGRVFLHAWTHRSLRRTNGLRSDQILQIPAVKTISNGGDRAVVLNYGENIMKLDNLTTGLSYKLTAVDSEASNTRFIVRVRYASMNNNKLNLVLNGAQIASLNVEHTVQRGGSLTDLQYGNFKYATFAGNFKMGSQSILGIFKEIPNIDFVLDKIELIPSNFMSSLEQTQNYNTYNQDTIYTHNQGYDTYDQNSSGMYHQSYNNYDQNMDTTYQPSYDNYNQNASGTYDDGYNPNASDSYDQSYTNNYSQNTNSMYDQGYYNNNYDQHSGCTCNQGYDNNYLK

SEQ ID NO: 233 - protein, 765 aa, Bacillus thuringiensis higo LBIT-976
MNPYQNKNEYEIVNNPQNYNTVSNRYPYTNDPNVAIQNTNYKDWMNGYEEINPSLISLILASIGILNQAIALTGVLGKTPENINIVQEMVGLISGSTGNDLLVHTEQLIQQTLAQQYRNAATGAVNAISKSYNDYLMFFRQWERNRTSQNGLLVESAFNSVNTLCLRTLTPQEALSRRGFETLLLPNYAQAANFHLLLLRDAVLYRTQWLPNFISTTNANIEILERSINQYRNHCNHWYNDGLNRFARTSFDDWVRFNAYRRDMTLSVLDFVTVFPTYNPINFPTPTNVELTRIVYTDPISPPRGYARTGSPSFRQMEDLIISGSPSFLNQLSIFTTYYHDPRNVNRDFWAGNRNYLSNGTSRQSGATTPWRTNIPMQNIDIFRVNLTTHDIDDISRSYGGVHRSDFIGVNTINNQRTTLFYHQNVDTSRFLIRNETVFLPGDSGLAPNERNYTHRLFQVMTTYRTNPNARRAAFLHAWTHRSLRRRNGFRTDQIMQIPAVKSISNGGDRAVISYTGENMMKLDNLTASLSYKLTAEDSEASNTRFIVRIRYASMNNNRLNLILNGTQIASLNVEGTMQNGGSLTNLQSENFKYATFSGNFKMGSQSIVGIFKEISNADFIFDQIEFIPIHFMPLLEQKQSYNNYDQNMDTTYQPNYDTYNQNANGMYDDTYYPNNNDSYNQNNTDMYDSGYNNNQNTNYNYDQEYNTYNQNMENTYDQSYENYNPETNNYNQYPNDMYNQEYTNDYNQNSGCRCNQGYNNNYPK

SEQ ID NO: 234 - protein, 1286 aa, Bacillus thuringiensis roskildiensis
MADLTELYPSYHNVLARPIRLDSIFDPFIDIFNALKGGWEEFAKTGYKDPLEQHLKIAWNASQNGTIDYLALTKASISFIGLIPDADAVVPFINMFVDFIFPKLFGEGSQQNSQAQFFELIIEKVKEIVDQEFRNFTLNTLLNDLDGMQTTLEHFQNDVQIAICQGEQPGLILDEKHPPCTPTKNHLVSVKESFKNARTSIETVLPHFKNPMTNNKTPDFNSDTVLLTLPMYTTAATLNLILHQGYIQFVERWKSVDYDEAFINQTKADLQHRIQEYSTTVSTTFEKFKPTLSNKKSSINTYNKYVRSMTLNCLDIAATWPTLDNVNYPSNVEIQLDQTRLVFSNLVGPFEGNDDISTYTRRSIMNYSKGDTPGDVNSAIQSLRYPRLELSKVQFYTHDQRSNGVRHCYTSGFNLTFNDNSSMSAKQDESATADSPPLTAPIKNMNANSQNSQYYDYSSINIDNQGGGGCSAFPSYQSNNPILPNQKINVFYPYGSSAHPIDPHTTDPDTWFKLGYVSSHIPYDLTPQNVIGEIDQDTKQPSLILKGFPAEKGYGGSIEYVSEPLNGANAAKLTLNQILYMQVTNLTTQKYQIRLRYATKNDTTASVWFHIIGPNNQDIINHSPDIPPRSNNKMFVQGENGKYVLDTLVDSIELPSGQLTILIQNINPDQDLFLDRIEFVPIPTLPTNPNISIPKTDTSPKDSKVLWEASPDIPIANTITLTGSVYDFADITFELYKNGNMVTSYPIKGPGPIPHRSHGNYVSCSQGILSYNYENKPVLDGFDQLRININSDPSFYDSNSGCDTKNQYSAEIKINPNLSATTDLEKITNQVNQLFTSSSQTELANTITDYRIDQIVMKVDALSNNVFGVEKKALRKLVNQAKQLSKARNVLAGGNFEKGHEWVLGREATMIANHELFKGDHLLLPPPTLYPSYAYQKIDESKLKSNTRYTVSGFIAQSEHLEVIVSRYGKEVHDMLDVPYEEALPISSDESPNCCKPATCQCPSCDGSQPDSHFFSYSIDVGSVQSDVNLGIEFGLRIAKPNGFAKISNLEIKEDRPLTDQEIKKIQRKEQKWKKAFDQEQAEVAATFQPTLDQINALYQNEDWNGSLHPHVTYQHLSAVVLPTLPKQRHWFMEDREGEHYGVTQQFQQALDRGFQQIEEQNLIHNGSFANGLTDWTVTGDAQLTIFDEDPVLELAHWDASVSQTIEIMDFEEETEYKLRVRGKGKGTVTVQHGEEELETMTFNTTSFTTQEQTFYFEGDTVDVHVQSENNTFLVDSVELIEVVEE

SEQ ID NO: 235 - protein, 722 aa, Bacillus thuringiensis
MKEQNLNKYDEITVQAASDYIDIRPIFQTNGSATFNSNTNITTLTQAINSQAGAIAGKTALDMRHDFTFRADIFLGTKSNGADGIAIAFHRGSIGFVGTKGGGLGILGAPKGIGFELDTYANAPEDEVGDSFGHGAMKGSFPSFPNGYPHAGFVSTDKNSRWLSALAQMQRIAAPNGRWRRLEIRWDARNKELTANLQDLTFNDITVGEKPRTPRTATWRLVNPAFELDQKYTFVIGSATGASNNLHQIGIIEFDAYFTKPTIEANNVNVPVGATFNPKTYPGINLRATDEIDGDLTSKIIVKANNVNTSKTGVYYVTYYVENSYGESDEKTIEVTVFSNPTIIASDVEIEKGESFNPLTDSRVGLSAQDSLGNDITQNVKVKSSNVDTSKPGEYEVVFEVTDSFGGKAEKDFKVTVLGQPSIEANNVELEIDDSLDPLTDAKVGLRAKDSLGNDITKDIKVKFNNVDTSNSGKYEVIFEVTDRFGKKAEKSIEVLVLGEPSIEANDVEVNKGETFEPLTDSRVGLRAKDSLGNDITKDVKIKSSNVDTSKPGEYEVVFEVTDRFGKYVEKTIGVIVPVIDDEWEDGNVNGWFYAGQDIKLLKDPDKKAYKGDYVFYDSRHVAISKTIPLTDLQINTNYEITVYAKAESGDHHLKVTYKKDPAGPEEPPVFNRLISTGTLVEKDYRELKGTFRVTELNKAPLIIVENFGAGYIGGIRIVKIS

SEQ ID NO: 236 - protein, 722 aa, Bacillus thuringiensis FZ-4
MKEQNLNKYDEITVQAASDYIDIRPIFQTNGSATFNSNTNITTLTQAINSQAGAIAGKTALDMRHDFTFRADIFLGTKSNGADGIAIAFHRGSIGFVGTKGGGLGILGAPKGIGFELDTYANAPEDEVGDSFGHGAMKGSFPSFPNGYPHAGFVSTDKNSRWLSALAQMQRIAAPNGRWRRLEIRWDARNKELTANLQDLTFNDITVGEKPRTPRTATWRLVNPAFELDQKYTFVIGSATGASNNLHQIGIIEFDAYFTKPTIEANNVNVPVGATFNPKTYPGINLRATDEIDGDLTSKIIVKANNVNTSKTGVYYVTYYVENSYGESDEKTIEVTVFSNPTIIASDVEIEKGESFNPLTDSRVGLSAQDSLGNDITQNVKVKSSNVDTSKPGEYEVVFEVTDSFGGKAEKDIKVTVLGQPSIEANNVELEIDDLFDPLTDAKVGLRAKDSLGNDITKDVKVKFNNVDTSNSGKYEVIFEVTDRFGKKAEKSIEVLVLGEPSIEANDVEVNKGETFEPLTDSRVGLRAKDSLGNDITKDVKIKSSNVDTSKPGEYEVVFEVTDRFGKYAEKTIGVIVPVIDDEWEDGNVNGWKFYAGQDIKLLKDPDKAYKGDYVFYDSRHVAISKTIPLTDLQINTNYEITVYAKAESGDHHLKVTYKKDPAGPEEPPVFNRLISTGTLVEKDYRELKGTFRVTELNKAPLIIVENFGAGYIGGIRIVKIS

SEQ ID NO: 237 - protein, 721 aa, Bacillus thuringiensis EG4140
MKDSISKGYDEITVQASDYIDIRSIFQTNGSATFNSTTNITTLTQATNSQAGAIAGKTALDMRHDFTFRADIFLGTKSNGADGIAIAFHRGSIGFVGEKGGGLGILGALKGIGFELDTYANAPQDEQGDSFGHGAMRGLFPGFPNGYPHAGFVSTDKNRGWLSALAQMQRIAAPNGRWRRLAIHWDARNKKLTANLEDLTFNDSTVLVKPRTPRYARWELSNPAFELDQKYTFVIGSATGASNNLHQIGIIEFDAYFTKPTIEANNVSVPVGATFNPKTYPGINLRATDEIDGDLTSEIIVTDNNVNTSKSGVYNVTYYVKNSYGESDEKTIEVTVFSNPTIIASDVEIEKGESFNPLTDSRVRLSAQDSLGNDITSKVKVKSSNVDTSKPGEYDVVFEVTDNFGGKAEKEIKVTVLGQPSIEANDVELEIGDLFNPLTDSQVGLRAKDSLGKDITNDVKVKSSNVDTSKPGEYEVVFEVTDRFGKKAEKSIKVLVLGEPSIEANNVEIEKDERFDPLTDSRVGLRAKDSLGKDITNDVKVKSSNVDTSKPGEYEVVFEVTDRFGKYVKKLIVVIVPVIDDEWEDGNVNGWKFYAGQDITLLKDPEKAYKGEYVFYDSRHAAISKTIPVTDLQVGGNYEITVYVKAESGDHHLKVTYKKDPKGPEEPPVFNRLISTGKLVEKDYRELKGTFRVTELNQAPLIIVENFGAGYIGGIRIVKIS

SEQ ID NO: 238 - protein, 716 aa, Bacillus thuringiensis
MKDSISKGYDEITVQASDYIDISIFQTNGSATFNSTTITTLTQATNSQAGAIGKTALDMRHDFTFRAIFLGTKSNGADGIAIAFHRGSIGFVGEKGGGGILGALKGIGFELDTYANAPQDEQGDSFGHGAMRGLFPGFPNGYPHAGFVSTDKNRGWLSALAQMQRIAAPNGRWRRLAIHWDARNKKLTANLEDLTFNDSTVLVKPRTPRYARWELSNPAFELDQKYTFVIGSATGASNNLHQIGIIEFDAYFTKPTIEANNVSVPVGATFNPKTYPGINLRATDEIDGDLTSEIIVTDNNVNTSKSGVYNVTYYVKNSYGESDEKTIEVTVFSNPTIIASDVEIEKGESFNPLTDSRVRLSAQDSLGNDITSKVKVKSSNVDTSKPGEYDVVFEVTDNFGGKAEKEIKVTVLGQPSIEANDVELEIGDLFNPLTDSQVGLRAKDSLGKDITNDVKVKSSNVDTSKPGEYEVVFEVTDRFGKKAEKSIKVLVLGEPSIEANNVEIEKDERFDPLTDSRVGLRAKDSLGKDITNDVKVKSSNVDTSKPGEYEVVFEVTDRFGKYVKKLIVVIVPVIDDEWEDGNVNGWKFYAGQDITLLKDPEKAYKGEYVFYDSRHAAISKTIPVTDLQVGGNYEITVYVKAESGDHHLKVTYKKDPKGPEEPPVFNRLISTGKLVEKDYRELKGTFRVTELNQAPLIIVENFGAGYIGGIRIVKIS

SEQ ID NO: 239 - protein, 632 aa, Bacillus thuringiensis
MNSKSIIEKGVQENQYIDIRNICSINGSAKFDPNTNITTLTEAINSQAGAIAGKTALDMRRDFTLVADIYLGSKSSGADGIAIAFHRGSIGFIGTMGGGLGILGAPNGIGFEIDTYWKATSDETGDSFGHGQMNGAHAGFVSTNRNASYLTALAPMQKIPAPNNKWRVLTINWDARNNKLTARLQEKSNDASTSTPSPRYQTWELLNPAFDLNQKYTFIIGSATGAANNKHQIGVTLFEAYFTKPTIEANPVDIELGTAFDPLNHEPIGLKATDEVDGDITKDITVEFNDIDTSKPGAYRVTYKVVNSYGESDEKTIEVVVYTKPTITAHDITIKKDLAFDPLNYEPIGLKATDPIDGDITDKIAVKFNNVDTSKPGKYHVTYKVINSYEKIDEKTIEVTVYTKPSIVAHDVEIKKDTAFDPLNYEPIGLKATDPIDGDITDKITVESNDVDTSKPGAYSVKYKVVNNYEESDEKTIAVTVPVIDDGWENGDPTGWKFFSGETITLEDDEEHALNGKWVFYADKHVAIYKQVELKNNIPYQITVYVKPEDEGTVAHHIVKVSFKSDSAGPESEEVINERLIDAEQIQKGYRKLTSIPFTPTTIVPNKKPVIIVENFLPGWIGGVRIIVEPTK

SEQ ID NO: 240 - protein, 267 aa, Bacillus thuringiensis
MGIINIQDEINNYMKEVYGATTVKSTYDPSFKVFNESVTPQFTEIPTEPVNNQLTTKRVDNTGSYPVESTVSFTWTETHTETSAVTEGVKAGTSISTKQSFKFGFVNSDVTLTVSAEYNYSTTNTTTTTETHTWSDSTKVTIPPKTYVEAAYIIQNGTYNVPVNVECDMSGTLFCRGYRDGALIAAVYVSVADLADYNPNLNLTNKGDGIAHFKGSGFIEGAQGLRSIIQVTEYPLDDNKGRSTPITYLINGSLAPNVTLKNSNIKF

SEQ ID NO: 241 - protein, 674 aa, Bacillus thuringiensis jegathesan
MNQYQNKNEYEILESSQNNMNMPNRYPFADDPNAVMKNGNYKDWVNECEGSNISPSPAAAITSKIVSIVLKTLAKAVASSLADSIKSSLGISKTITENNVSQVSMVQVHQIINRRIQETILDLGESSLNGLVAIYNRDYLGALEAWNNNKSNINYQTNVAEAFKTVEREFFTKLKGIYRTSSSQITLLPTFTQAANLHLSMLRDAVMYQEGWNLQSHINYSKELDDALEDYTNYCVEVYTKGLNALRGSTAIDWLEFNSFRRDMTLMVLDLVAIFPNYNPVRYPLSTKISLSRKIYTDPVGRTDSPSFGDWTNTGRTLANFNDLEREVTDSPSLVKWLGDMTIYTGAIDSYRPTSPGDRIGVWYGNINAFYHTGRTDVVMFRQTGDTAYEDPSTFISNILYDDIYKLDLRAAAVSTIQGAMDTTFGVSSSRFFDIRGRNQLYQSNKPYPSLPITITFPGEESSEGNANDYSHLLCDVKILQEDSSNICEGRSSLLSHAWTHASLDRNNTILPDEITQIPAVTAYELRGNSSVVAGPGSTGGDLVKMSYHSVWSFKVYCSELKNYRVRIRYASHGNCQFLMKRWPSTGVAPRQWARHNVQGTFSNSMRYEAFKYLDIFTITPEENNFAFTIDLESGGDLFIDKIEFIPVSGSAFEYEGKQNIEKTQKAVNDLFIN

SEQ ID NO: 242 - protein, 675 aa, Bacillus thuringiensis sotto
MVNPYQNKKESVFYEHSNNQKDIPNRYPFTNNPNAVMKNGNYKDWVNECEGSNVSPSPAAAVTSAIISIVLKTLAKALVSSLVDAIKSSLGISEVITKNNVSQLSMELVNQLINRRIQETIMDLGSASLNGLMSIYKRYLNALEAWDKDKSNITLQENVIEEFKYVESRFFENLKGIYRTSSSQITLLPTFAQAANLHLSMLRDAVMYQEGWNLQSHLDYKMELDIALKDYTNYCVEVYNRGLNALRGSTALDWLEFNSFRRDMTLMVLDLVAIFPNYDPVQYPLPTKIGLSRKIYTDPVGTTRDTDFGNWTLTDRTLANFNDLERDVTDSPSLVKWLVDMNIYTGAIDSYPISGPGGERIGVWYGNMNSFVLTGSRELSYNMYGEIAHEDPITNIRDNDIYKVDLRAAYVATIRNALDSTFGVSSSHFFNVMGKNELYQSKQPYPSYPITITFPGEESLEGNVNDYSHLLCNVKNITGGLRQTSARGRSSLLSHAWTHKSLNPKNIIAADKITHIPAVKGSNLSASSAVIKGPGFTGGDLLRLGPNQFVDYILTPDNPQVSQIYFDVRLRYACMGGANILIQFWNKNWEIGVQLVSTTSSLENLKYENFAYITTRLSFTFGQGGYNMSIYNPTSNPNVIIDKIEFIPVSGTPFEYEGKHKLKNTQADVNNLFLN

SEQ ID NO: 243 - protein, 686 aa, Bacillus thuringiensis FCC-41
MNPYQNKNKYEILESSSDYTKISNKYPFANDPNITMKHMNYKDWMHMCETPTPFSASIIISVISIFGRVLGLSSSFANTSKYIAIITGILGLLGSSSSGSTNVWDNLIKHIEELTDRFIDTSVRFTGMSTVNGLNSQYLYYLDLFEDWYEDQNNEQKRNRLVGTFQTLGLAFINALGYRNTNGQEVRGTLSTAYEVQFLPSYAQAANLHLLLLKDAVTYGDKWILIEPTSNYYNRFKDNIARYTDYCTEYFHKGLDNLKKPGSDAVSWLRFNGFRRDMTLMVLDLITLFPLYDSVQYPLPTQIELSRQIYTDPVGATFSDFSNWTLTNRTLANFNDLEREVTDAPSLLKWLNSIEVYTGAIDSHRPTSPGERIGVWYGNRNTYINPDTNEVSYRFTGELAYENPYTFIGSFFDNDIYKVALRAAAVSTTFGSNDSTFGVSSSQFFNRRGIHQLYESSQPIPSWPITLAFPGEESSEGNANDYSHRLCDVKNITGGLRQTPARGRSSLLSHAWTHSSLKLRNIIAADKITQIPAVKTWEIRGTSSVVAGPGNTGGNLVKMSYHSVWNIKFTCQQLKRYRVRIRYASDGNCQLAMRRWRGGPGYVQEARHTVQRTFSGSMTYDSFKYLDIFTMPAEDYTFNLTIDLESGGALYIDKIEFTPDDITTLEYEGERDLEKTKNTVNDLFTN

SEQ ID NO: 244 - protein, 675 aa, Bacillus thuringiensis jegathesan
MNPYQNKSECEILNAPLNNINMPNRYPFANDPNAVMKNGNYKDWLNECDGITPSIFGTLGVLASIVISTINLATSPSIGDAFALVSSIGEYWPETKTSFPLSVADVNRLIREALDQNAINRATGKFNGLMDTYNTVYLKNLQDWYDTRIPANPQGDSQLREAARRSLEEIERDFRKALAGEFAEAGSQIVLLPIYAQAANIHLLILKDAMQFRTDLGLIRPVGVPITTSAEDPFESEFLLRIKKYTDHCISYYDDGLAKIRSRGSDGETWWEFNKFRREMTLTVLDLVALYPTHNIKLYPIPTQTELSRVVYTDPVGCFGNRKSDIFSRLNFDYLENRLTRPREPFNYLNSVQLFASTVSNSNNGEVLRGNLNKIMFEGGWTASRSGDGVTTGTPFSTMDWSYGWGYPRKHYAEITSRSQALPGLNNSIHVIVGIDSFRAIGPGGQGDHTFSLPGGDMYDCGKVQINPLEDYRNSDHWISDMMTINQSVQLASNPTQTFAFSALSLGWHHSSAGNRNVYVYDKITQIPATKTVREHPMIKGPGFTGGDLADLSSNSDILQYDLRSDYDDRLTEDVPFRIRIRCASIGVSTISVDNWGSSSPQVTVASTAASLDTLKYESFQYVSIPGNYYFDSAPRIRLLRQPGRLLVDRIEIIPVNFFPLSEQENKSVDSLFIN

SEQ ID NO: 245 - protein, 1163 aa, Bacillus thuringiensis finitimus B-1166
MNSEEMNHVNPFEISDNNDVSIPSQRYPFANDPADSVFCADDFLQSYGEFNMDNFGESEPFIDASGAINAAIGVTGTVLGFLGVPFAGALTTFYQKLFGFLFPNNNTKQWEEFMKQVEALIDEKISDAVRNKAISELQGLVNNITLYTEALEEWLENKENPAVRDRVLQRWRILDGFFEQQMPSFAVKGFEVLLLVVYTQAANLHLLSLRDAYIYGAEWGLTPTNIDQNHTRLLRHSAEYTDHCVNWYNTGLKQLENSDAKSWFQYNRFRREMTLSVLDVIALFPAYDVKMYPIPTNFQLTREVYTDVIGKIGRNDSDHWYSANAPSFSNLESTLIRTPHVVDYIKKLKIFYATVDYYGIYGRSGKWVGHIITSATSANTTETRNYGTIVNHDSVELNFEGKNIYKTGSLPQGVPPYQIGYVTPIYFITRAVNFFTVSGSKTSVEKYYSKKDRYYSEGLPEEQGVFSTEQLPPNSIAEPEHIAYSHRLCHVTFISVSNGNKYSKDLPLFSWTHSSVDFDNYVYPTKITQLPATKGYNVSIVKEPGFIGGDIGKNNGQILGKYKVNVEDVSQKYRFRVRYATETEGELGIKIDGRTVNLYQYKKTKAPGDPLTYKAFDYLSFSTPVKFNNASSTIELFLQNKTSGTFYLAGIEIIPVKSNYEEELTLEEAKKAVSSLFTDARNALKIDVTDYQIDQAANLVECISGDLYAKEKIVLLRAVKFAKQLSQSQNLLSDPEFNNVNRENSWTASTSVAIIEGDPLYKGRAVQLSSARDENFPTYLYQKIDESTLKPYTRYQLRGFVEGSENLDVYLIRYGAAHVRMNVPYNLEIIDTSSPVNPCEEVDGLSHRSCNVFDRCKQSISVAPDANTGPDQIDGDPHAFSFHIDTGTVDSTENLGIWVAFKISELDGSAIFGNLELIEVGPLSGEALAQVQRKEEKWKQVLAKKRETTAQTVCSGEASQLTNSSQILKIRNYDLIQNFRIFSLRNTLSIKFKIYTITNYPYSRLNYDLFMELENRIQNASLYMTSNILQNGGFKSDVTSWETTANAEVQQIDGASVLVLSNWNASVAQSVNVQNDHGYVLRVTAKKEGIGNGYVTILDCANHIDTLTFSACRSDSDTSSNELTAYVTKTLEIFPDTEQIRIEIGETEGMFYVESVELIRMEN

SEQ ID NO: 246 - protein, 826 aa, Bacillus thuringiensis higo
MNPYQNKNEYEILDAKRNNCHMSNGYPRHPLANDPQMYLRNAHYKDWLSMCNKNNPVGLIPPESFEWTWLNGTVAALTIVSVIAGILVTAPVSVTAGLITVLGAGAALLAGITPLIWPATTDNTFNKITDATEVLLNKEISEFVRKTANTKIDSLQQLIYYYQNALENWKKNPNDSAARNTVSTRFQIVNAFFVEAMPALSMPGYEVVQLGAYAQAANLHLILLREGIAYADQWNLARDPMHAAGDLHYKEFLDYRNQYINHCSTWYNEGQNEANLKNNGLVYQRTMTLFVLDLIAMFSTYDPRLYTMPIKTEILTRTIYTDGVNRNEPKSIHNPGLFRRLEQMKLHIYEYQGAQFLSGHQNIFRSMNYNHPLIYGPVQGYSSSNINKITTINLGDYDKIYSINTESRNRLVQGSTTFDKINFYGAFNENWLFSVYNQNGPIIKHSNIPGIDAPSTGLNYSNYTHYLSNCIFQSNRNGGSAPDYNTQSYVFGWNHYTIDPTGNYVTDAFEVNKNLPESRYVPQISQVPAVKASDIFNPGRVVNAKVESGPYFTGGDVIVSKAQLDGSGLARTLITFPIIPKRYRASGFRVRMYYAANHTGQVSYGVANINTTGYANFQKTFDGWEYFRARHEHFKYIEFDTTFSLRNSGQLEEHLLHIYYPNTTKISGDQLLIIDKIEFIPVGIPLNQTSEGYNTYDQNTNSYNQNYNNYNQNMDTTYQPNYDNYKQNSSGMYDNPYNQNPKDSYNQNYTDTYDSGYNNSQNVGSNYNQEYNTYNQDTENMYNQSYNNYNSDNNNYNQNSDCMCSPGYNGNYECRCNQRANGNYPK

SEQ ID NO: 247 - protein, 1109 aa, Bacillus thuringiensis finitimus B-1161
MAQTYYKIGVQSTEVNSESIFFNPEVDSSDTVAVVSAGIVVVGTILTAFASFVNPGVVLISFGTLAPVLWPDPEEDPKKIWSQFMKHGEDLLNQTISTAVKEIALAHLNGFKDVLTYYERAFNDWKRNPSANTARLVSQRFENAHFNFVSNMPQLQLPTYDTLLLSCYTEAANLHLNLLHQGVQFADQWNADQPHSPMLKSSGTYYDELLVYIEKYINYCTKTYHKGLNHLKESEKITWDAYNTYRREMTLIVLDLVATFPFYDIRRFPRGVELELTREVYTSLDHLTRPPGLFTWLSDIELYTESVAEGDYLSGIRESKYYTGNQFFTMKNIYGNTNRLSKQLITLLPGEFMTHLSINRPFQTIAGINKLYSLIQKIVFTTFKNDNEYQKNFNVNNQNEPQETTNYPNDYGGSNSQKFKHNLSHFPLIIHKLEFAEYFHSIFALGWTHNSVNSQNLISESVSTQIPLVKAYEVTNNSVIRGPGFTGGDLIELRDKCSIKCKASSLKKYAISLFYAANNAIAVSIDVGDSGAGVLLQPTFSRKGNNNFTIQDLNYKDFQYHTLLVDIELPESEEIHIHLKREDDYEEGVILLIDKLEFKPIDENYTNEMNLEKAKKAVNVLFINATNALKMDVTDYHIDQVANLVECISDDLYAKEKIKFTPCIKFAKQLSQARNLLSDPNFNNLNAENSWTANTGVTIIEGDPLYKGRAIQLSAARDENFPTYLYQKIDESLLKPYTRYQLRGFVEGSQDLELDLVRYGATDIVMNVPGDLEILSYSAPINPCEEIETRLDTTCGALDRCKQSNYVNSAADVRPDQVNGDPHAFSFHIDTGTTDNNRNLGIWIIFKIATPDGYATFGNLELIELGPLSGEALAQVQRKEQKWGKNTTQKREEAAKLYAAAKQTINQLFADSQGTKLRFDTEFSNILSADKLVYKIRDVYSEVLSVIPGLNYDLFMELENRIQNAIDLYDARNTVTNGEFRNGLANWMASSNTEVRQIQAHPCWYSLGWNAQVAQSLNVKPDHGYVLRVTAKKEGIGNGYVTILDCANHIDTLTFSSCDSGFTTSSNELAAYVTKTLEIFPDTDQIRIEIGETRSTFYVESVDLIRMED

SEQ ID NO: 248 - protein, 1128 aa, Bacillus thuringiensis finitimus
MDKHINKIGVQSTEVNSESIFFNPEVDSSDTVAVVSAGIVVVGTILTAFASFVNPGVVLISFGTLAPVLWPDPEEDPKKIWSQFMKHGEDLLNQTISTAVKEIALAHLNGFKDVLTYYERAFNDWKRNPSANTARLVSQRFENAHFNFVSNMPQLQLPTYDTLLLSCYTEAANLHLNLLHQGVQFADQWNADQPHSPMLKSSGTYYDELLVYIEKYINYCTKTYHKGLNHLKESEKITWDAYNTYRREMTLIVLDLVATFPFYDIRRFPRGVELELTREVYTSLDPPGLNAGPIPEIDFSYLEDHLTRPPGLFTWLSDIELYTESVAEGDYLSGIRESKYYTGNQFFTMKNIYGNTNRLSKQLITLLPGEFITHLSINRGFQTIAGINKLYSLIQKIVFTTFKNDNEYQKNFNVNNQNEPQETTNYPNDYGGSNSQKFKHNLSHFPLIIHQVEFAEYFHSIFALGWTHNSVNSQNLISESVSTQIPLVKAYEVTTNSVIRGPGFTGGDLIELRDKCSIKCKASSLKKYAISLFYAANNAIAVSIDVGDSGAGVLLQPTFSRKGNNNFTIQDLNYKDFQYHTLLVDIELPESEEIHIHLKREDDYEEGVILLIDKLEFKPIDENYTNEMNLEKAKKAVNVLFINATNALKMDVTDYHIDQVANLVECISDDLYAKEKIKLLHAIKFAKQLSQARNLLSDPNFNNLNAENSWTANTGVTIIEGDPLYKGRAIQLSAARDENFPTYLYQKIDESLLKPYTRYQLRGFVEGSQDLELDLVRYGATDIVMNVPGDLEILSYSAPINPCEEIETRLDTTCGALDRCKQSNYVNSAADVRPDQVNGDPHAFSFHIDTGTTDNNRNLGIWIIFKIATPDGYATFGNLELIELGPLSGEALAQVQRKEQKWGKNTTQKREEAAKLYAAAKQTINQLFADSQGTKLRFDTEFSNILSADKLVYKIRDVYSEVLSVIPGLNYDLFMELENRIQNAIDLYDARNTVTNGEFRNGLANWMASSNTEVRQIQDTSVLVLSSWNAQVAQSLNVKPDHGYVLRVTAKKEGIGNGYVTILDCANHIDTLTFSSCDSGFTTSSNELAAYVTKTLEIFPDTDQIRIEIGETEGTFYVESVDLIRMED

SEQ ID NO: 249 - protein, 650 aa, Bacillus thuringiensis medellin
MNSFQNKNEYEILNAPSSISNIPNNYSKYPIANTLNQTMQNTNYKDWTNMCAIDNNLKSINPFEANLQNSLVGLFAITAAIASLLSAPITGGTSIAAGTAIAAAIIPILWPSQENNLPDKLLAISEATLYSFQDQRVREDALTRLESLKDSVKYFENAFTFWINNPNSTNTTTVRERFQEVNGRFVGSMAFFRAKNYEPILLSTYAQAARLHLLHLRDGITYAEKWNLSRQGDDMPGDLLYKEFNKYCNEYIEHCIKWYNESLSLLKSVGANWLEYNQYRTFLTASVLDVISLFSSYDPRLYKERLSVEILTRKLYTDPINYHRGISLEADESKYTLEPTLFTQLYTLTFYSNIFYNYMGHTNTYRYLSPDKIFAERSFGKQSSYIDKVPVIPNDKSIIYKIRAYDNHNGLFNVMYFGFWDGEKDQIQKIIGGSSTEIYIKNCTHRLADVISHDLDEKNKCYSFAWTSTTISLENEIKNDIITQIPAVKAYQLGVQSQVIKGPGHTGGDLINLKSNDYLRISCQHLSNVTKKYFVRIRYATNGSLNTRPIINITIPGMTPQGMVLDNTFSGTGYSNLEYQNFGYKEFLKEVTLNPNQSISLTLNRSDQNSNSILLLDRIEFLPITPSIRKSKEQQNLEKNQKTVNKLFFN

SEQ ID NO: 250 - protein, 633 aa, Bacillus thuringiensis kurstaki
MNNVLNSGRTTICDAYNVVAHDPFSFEHKSLDTIQKEWMEWKRTDHSLYVAPVVGTVSSFLLKKVGSLIGKRILSELWGIIFPSGSTNLMQDILRETEQFLNQRLNTDTLARVNAELIGLQANIREFNQQVDNFLNPTQNPVPLSITSSVNTMQQLFLNRLPQFQIQGYQLLLLPLFAQAANMHLSFIRDVILNADEWGISAATLRTYRDYLRNYTRDYSNYCINTYQTAFRGLNTRLHDMLEFRTYMFLNVFEYVSIWSLFKYQSLMVSSGANLYASGSGPQQTQSFTAQNWPFLYSLFQVNSNYILSGISGTRLSITFPNIGGLPGSTTTHSLNSARVNYSGGVSSGLIGATNLNHNFNCSTVLPPLSTPFVRSWLDSGTDREGVATSTNWQTESFQTTLSLRCGAFSARGNSNYFPDYFIRNISGVPLVIRNEDLTRPLHYNQIRNIESPSGTPGGARAYLVSVHNRKNNIYAANENGTMIHLAPEDYTGFTISPIHATQVNNQTRTFISEKFGNQGDSLRFEQSNTTARYTLRGNGNSYNLYLRVSSIGNSTIRVTINGRVYTVSNVNTTTNNDGVNDNGARFSDINIGNIVASDNTNVTLDINVTLNSGTPFDLMNIMFVPTNLPPLY

SEQ ID NO: 251 - protein, 633 aa, Bacillus thuringiensis; identical to SEQ ID NO: 250

SEQ ID NO: 252 - protein, 635 aa, Bacillus thuringiensis
MNNVLNSGKTTICNAYNVVAHDPFSFEHKSLDTIQEEWMEWKRTDHSLYVAPVVGTVSSFLLKKVGSLIGKRILSELWGLIFPSGSTNLMQDILRETEQFLNQRLNTDTLDRVNAELEGLQANIREFNQQVDNFLNPTQNPVPLSITSSVNTMQQLFLNRLPQFQIQGYQLLLLPLFAQAANMHLSFIRDVILNADEWGISAATLRTYRDYLRNYTRDYSNYCINTYQTAFRGLNTRLHDMLEFRTYMFLNVFEYVSIWSLFKYQSLMVSSGANLYASGSGPQQTQSFTAQNWPFLYSLFQVNSNYILSGISGNRLSTTFPNIGGLPGSTTIHSLNSARVNYSGGVSSGLIGATNLNHNFNCSTVLPPLSTPFVRSWLDSGTDREGVATSTTWQTESFQITSGLRCGAFPFSARGNSNYFPDYFIRNISGVPLVIRNEDLTRPLHYNQIRNIESPSGTPGGLRAYMVSVHNRKNNIYAAHENGTMIHLAPEDYTGFTISPIHATQVNNQTRTFISEKFGNQGDSLRFEQSNTTARYTLRGNGNSYNLYLRVSSIGNSTIRVTINGRVYTASNVNTNTNNDGVNDNGARFSDINIGNVVASDNTNVPLDINVTLNSGTQFELMNIMFVPTNLPPLY

SEQ ID NO: 253 - protein, 633 aa, Bacillus thuringiensis Rpp39
MNNVLNSGRTTICDAYNVVAHDPFSFEHKSLDTIQKEWMEWKRTDHSLYVAPVVGTVSSFLLKKVGSLIGKRILSELWGIIFPSGSTNLMQDILRETEQFLNQRLNTDTLARVNAELIGLQANIREFNQQVDNFLNPTQNPVPLSITSSVNTMQQLFLNRLPQFQIQGYQLLLLPLFAQAANMHLSFIRDVILNADEWGISAATLRTYRDYLRNYTRDYSNYCINTYQTAFRGLNTRLHDMSEFRTYMFLNVFEYVSIWSLFKYQSLMVSSGANLYASGSGPQQTQSFTAQNWPFLYSLFQVNSNYILSGISGTRLSITFPNIGGLPGSTTTHSLNSARVNYSGGVSSGLIGATNLNHNFNCSTVLPPLSTPFVRSWLDSGTDREGVATSTNWQTESFQTTLSLRCGAFSARGNSNYFPDYFIRNISGVPLVIRNEDLTRPLHYNQIRNIESPSGTPGGARAYLVSVHNRKNNIYAANENGTMIHLAPEDYTGFTISPIHATQVNNQTRTFISEKFGNQGDSLRFEQSNTTARYTLRGNGNSYNLYLRVSSIGNSTIRVTINGRVYTVSNVNTTTNNDGVNDNGARFSDINIGNIVASDSTNVTLDINVTLNSGTPFDLMNIMFVPTNLPPLY

SEQ ID NO: 254 - protein, 633 aa, Bacillus thuringiensis 146-158-01
MNSVLNSGRTTICDAYNVAAHDPFSFQHKSLDTVQKEWTEWKKNNHSLYLDPIVGTVASFLLKKVGSLVGKRILSELRNLIFPSGSTNLMQDILRETEKFLNQRLNTDTLARVNAELTGLQANVEEFNRQVDNFLNPNRNAVPLSITSSVNTMQQLFLNRLPQFQMQGYQLLLLPLFAQAANLHLSFIRDVILNADEWGISAATLRTYRDYLKNYTRDYSNYCINTYQSAFKGLNTRLHDMLEFRTYMFLNVFEYVSIWSLFKYQSLIVSSGANLYASGSGPQQTQSFTAQNWPFLYSLFQVNSNYILSGISGTRLSITFPNIGGLPGSTTTHSLNSARVNYSGGVSSGLIGATNLNHNFNCSTVLPPLSTPFVRSWLDSGTDREGVATSTNWQTESFQTTLSLRCGAFSARGNSNYFPDYFIRNISGVPLVIRNEDLTRPLHYNQIRNIESPSGTPGGARAYLVSVHNRKNNIYAANENGTMIHLAPEDYTGFTISPIHATQVNNQTRTFISEKFGNQGDSLRFEQSNTTARYTLRGNGNSYNLYLRVSSIGNSTIRVTINGRVYTVSNVNTTTNNDGVNDNGARFSDINIGNIVASDNTNVTLDINVTLNSGTPFDLMNIMFVPTNLPPLY

SEQ ID NO: 255 - protein, 633 aa, Bacillus thuringiensis HD-550
MNSVLNSGRTTICDAYNVVAHDPFSFEHKSLDTIQKEWMEWKRTDHSLYVAPVVGTVSSFLLKKVGSLFGKRILSELWGIIFPSGSTNLMQDILRETEQFLNQRLNTDTLARVNAELIGLQANIREFNQQVDNFLNPTQNPVPLSITSSVNTMQQLFLNRLPQFQIQGYQLLLLPLFAQAANMHLSFIRDVILNADEWGISAATLRTYRDYLRNYTRDYSNYCINTYQTAFRGLNTRLHDMLEFRTYMFLNVFEYVSIWSLFKYQSLMVSSGANLYASGSGPQQTQSFTAQNGPFLYSLFQVNSNYILSGISGTRLSITFPNIGGLPGSTTTHSLNSARVNYSGGVSSGLIGATNLNHNFNCSTVLPPLSTPFVRSWLDSGTDREGVATSTNWQTESFQTTLSLRCGAFSARGNSNYFPDYFIRNISGVPLVIRNEDLTRPLHYNQIRNIESPSGTPGGARAYLVSVHNRKNNIYAANENGTMIHLAPEDYTGFTISPIHATQVNNQTRTFISEKFGNQGDSLRFEQSNTTARYTLRGNGNSYNLYLRVSSIGNSTIRVTINGRVYTVSNVNTTTNNDGVNDNGARFSDINIGNIVASDNTNVTLDINVTLNSGTPFDLMNIMFAPTNLPPLY

SEQ ID NO: 256 - protein, 633 aa, Bacillus thuringiensis kurstaki HD1; identical to SEQ ID NO: 250

SEQ ID NO: 257 - protein, 635 aa, Bacillus thuringiensis sotto
MNNVLNSGKTTICNAYNVVAHDPFSFEHKSLDTIQEEWMEWKRTDHSLYVAPVVGTVSSFLLKKVGSLIGKRILSELWGLIFPSGSTNLMQDILRETEQFLNQRLNTDTLDRVNAELEGLQANIREFNQQVDNFLNPTQNPVPLSITSSVNTMQQLFLNRLPQFQIQGYQLLLLPLFAQAANMHLSFIRDVILNADEWGISAATLRTYRDYLRNYTRDYSNYCINTYQTAFRGLNICLHDMLEFRTYMFLNVFEYVSIWSLFKYQSLMVSSGANLYASGSGPQQTQSFTAQNWPFLYSLFQVNSNYILSGISGNRLSTTFPNIGGLPGSTTIHSLNSARVNYSGGVSSGLIGATNLNHNFNCSTVLPPLSTPFVRSWLDSGTDREGVATSTTWQTESFQITSGLRCGAFPFSARGNSNYFPDYFIRNISGVPLVIRNEDLTRPLHYNQIRNIESPSGTPGGLRAYMVSVHNRKNNIYAAHENGTMIHLAPEDYTGFTISPIHATQVNNQTRTFISEKFGNQGDSLRFEQSNTTARYTLRGNGNSYNLYLRVSSIGNSTIRVTINGRVYTASNVNTNTNNDGVNDNGARFSDINIGNVVASDNTNVPLDINVTLNSGTQFELMNIMFVPTNLPPLY

SEQ ID NO: 258 - protein, 633 aa, Bacillus thuringiensis kenyae HD549
MNSVLNSGRTTICDAYNVVAHDPFSFEHKSLDTIQKEWMEWKRTDHSLYVAPVVGTVSSFLLKKVGSLIGKRILSELWGIIFPSGSTNLMQDILRETEQFLNQRLNTDTLARVNAELIGLQANIREFNQQVDNFLNPTQNPVPLSITSSVNTMQQLFLNRLPQFQIQGYQLLLLPLFAQAANMHLSFIRDVILNADEWGISAATLRTYRDYLRNYTRDYSNYCINTYQTAFRGLNTRLHDMLEFRTYMFLNVFEYVSIWSLFKYQSLMVSSGANLYASGSGPQQTQSFTAQNWPFLYSLFQVNSNYILSGISGTRLSITFPNIGGLPGSTTTHSLNSARVNYSGGVSSGLIGATNLNHNFNCSTVLPPLSTPFVRSWLDSGTDREGVATSTNWQTESFQTTLSLRCGASSARGNSNYFPDYFIRNISGVPLVIRNEDLTRPLHYNQIRNIESPSGTPGGARAYLVSVHNRKNNIYAANENGTMIHLAPEDYTGFTISPIHATQVNNQTRTFISEKFGNQGDSLRFEQSNTTARYTLRGNGSSYNLYLRVSSIGNSTIRVTINGRVYTVSNVNTTTNNDGVNDNGARFPDINIGNIVASDNTNVTLDINVTLNSGTPFDLMNIMFVPTNLPPLY

SEQ ID NO: 259 - protein, 633 aa, Bacillus thuringiensis SL39
MNNVLNSRRTTICDAYNVVAHDPFSFEHKSLDTIQKEWMEWKRTDHSLYVAPVVGTVSSFLLKKVGSLIGKRILSELWGIIFPSSSTNLMQDILRETEQFLNQRLNTDTLARVNAELIGLQANIREFNQQVDNFLNPTQNPVPLSITSSVNTMQQLFLNRLPQFQIQGYQLLLLPLFAQAANMHLSFIRDVILNADEWGISAATLRTYRDYLRNYTRDYSNYCINTYQTAFRGLNTRLHDMLEFRTYMFLNVFEYVSIWSLFKYQSLMVSSGANLYASGGGPQQTQSFTAQNWPFLYSLFQVNSNYILSGISGTRLSITFPNIGGLPGSTTTHSLNSARVNYSGGVSSGLIGATNLNHNFNCSTVLPPLSTPFVRSWLDSGTDREGVATSTNWQTESFQTTLSLRCGAFSARGNSNYFPDYFIRNISGVPLVIRNEDLTRPLHYNQIRNIESPSGTPGGARAYLVSVHNRKNNIYAANENGTMIHLAPEDYTGFTISPIHATQVNNQTRTFISEKFGNQGDSLRFEQSNTTARHTLRGNGNSYNLYLRVSSIGNSTIRVTINGRVYTVSNVNTTTNNDGVNDNGARFSDINIGNIVASDNTNVTLDINVTLNSGTPFDLMNIMFVPTNLPPLY

SEQ ID NO: 260 - protein, 633 aa, Bacillus thuringiensis YZ71
MNNVLNSGRTTICDAYNVVAHDPFSFEHKSLDTIQKEWMEWRRTDHSLYVAPVVGTVSSFLLKKVGSLIGKRILSELWGIIFPSGSTNLMQDILRETEQFLNQRLNTDTLARVNAELIGLQANIREFNQQVDNFLNPTQNPAPLSITSSVNTMQQLFLNRLPQFQIQGYQLLLLPLFAQAANMHLSFIRDVILNADEWGISAATLRTYRDYLRNYTRDYSNYCINTYQTAFRGLNTRLHDMLEFRTYMFLNVFEYVSIWSLFKYQSLMVSSGANLYASGSGPQQTQSFTAQNWPFLYSLFQVNSNYILSGISGTRLSITFPNIGGLPGSTTTHSLNSARVNYSGGVSSGLIGATNLNHNFNCSTVLPPLSTPFVRSWLDSGTDREGVATSTNWQTESFQTTLSLRCGAFSARGNSNYFPDYFIRNISGVPLVIRNEDLTRPLHYNQIRNIESPSGTPGGARAYLVSVHNRKDNIYAANENGTMIHLAPEDYTGFTISPIHATQVNNQTRTFISEKFGNQGDSLRFEQSNTTARYTLRGNGNSYNLYLRVSSIGNSTIRVTINGRVYTVSNVNTTTNNDGVNDNGARFSDINIGNIVASDNTNVTLDINVTLNSGTPFDLMNIMFVPTNPPPLY

SEQ ID NO: 261 - protein, 551 aa, Bacillus thuringiensis CY29
MNNVLNSRRTTICDAYNVVAHDPFSFEHKSLDTIQKEWMEWKRTDHSLYVAPVVGTVSSFLLKKVGSLIGKRILSELWGIIFPSSSTNLMQDILRETEQFLNQRLNTDTLARVNAELIGLQANIREFNQQVDNFLNPTQNPVPLSITSSVNTMQQLFLNRLPQFQIQGYQLLLLPLFAQAANMHLSFIRDVILNADEWGISAATLRTYRDYLRNYTRDYSNYCINTYQTAFRGLNTRLHDMLEFRTYMFLNVFEYVSIWSLFKYQSLMVSSGANLYASGGGPQQTQSFTAQNWPFLYSLFQVNSNYILSGISGTRLSITFPNIGGLPGSTTTHSLNSARVNYSGGVSSGLIGATNLNHNFNCSTVLPPLSTPFVRSWLDSGTDREGVATSTNWQTESFQTTLSLRCGAFSARGNSNYFPDYFIRNISGVPLVIRNEDLTRPLHYNQIRNIESPSGTPGGARAYLVSVHNRKNNIYAANENGTMIHLAPEDYTGFTISPIHATQVNNQTRTFISEKFGNQGDSLRFEQSNTTARHTLRGNGNSYNLYLRVSS

SEQ ID NO: 262 - protein, 633 aa, Bacillus thuringiensis Dongbei 66
MNNVLNSGRTTICDAYNVVAHDPFSFEHKSLDTIQKEWMEWKRTDHSLYVAPVVGTVSSFLLKKVGSLIGKRILSELWGIIFPSGSTNLMQDILRETEQFLNQRLNTDTLARVNAELIGLQANIREFNQQVDNFLNPTQNPVPLSITSSVNTMQQLFLNRLPQFQIQGYQLLLLPLFAQAANMHLSFIRDVILNADEWGISAATLRTYRDYLRNYTRDYSNYCINTYQTAFRGLNTRLHDMLEFRTYMFLNVFEYVSIWSLFKYQGLMVSSGANLYASGSGPQQTQSFTAQNWPFLYSLFQVNSNYILSGISGTRLSITFPNIGGLPGSTTTHSLNSARVNYSGGVSSGLIGATNLNHNFNCSTVLPPLSTPFVRSWLDSGTDREGVATSTNWQTESFQTTLSLRCGAFSARGNSNYFPDYFIRNISGVPLVIRNEDLTRPLHYNQIRNIESPSGTPGGARAYLVSVHNRKNNIYAANENGTMIHLAPEDYTGFTISPIHATQVNNQTRTFISEKFGNQGDSLRFEQSNTTARYTLRGNGNSYNLYLRVSSIGNSTIRVTINGRVYTVSNVNTTTNNDGVNDNGARFSDINIGNIVASDNTNVTLDINVTLNSGTPFDLMNIMFVPTNLPPLY

SEQ ID NO: 263 - protein, 633 aa, Bacillus thuringiensis; identical to SEQ ID NO: 250

SEQ ID NO: 264 - protein, 633 aa, Bacillus thuringiensis kurstaki HD1
MNSVLNSGRTTICDAYNVAAHDPFSFQHKSLDTVQKEWTEWKKNNHSLYLDPIVGTVASFLLKKVGSLVGKRILSELRNLIFPSGSTNLMQDILRETEKFLNQRLNTDTLARVNAELTGLQANVEEFNRQVDNFLNPNRNAVPLSITSSVNTMQQLFLNRLPQFQMQGYQLLLLPLFAQAANLHLSFIRDVILNADEWGISAATLRTYRDYLKNYTRDYSNYCINTYQSAFKGLNTRLHDMLEFRTYMFLNVFEYVSIWSLFKYQSLLVSSGANLYASGSGPQQTQSFTSQDWPFLYSLFQVNSNYVLNGFSGARLSNTFPNIVGLPGSTTTHALLAARVNYSGGISSGDIGASPFNQNFNCSTFLPPLLTPFVRSWLDSGSDREGVATVTNWQTESFETTLGLRSGAFTARGNSNYFPDYFIRNISGVPLVVRNEDLRRPLHYNEIRNIASPSGTPGGARAYMVSVHNRKNNIHAVHENGSMIHLAPNDYTGFTISPIHATQVNNQTRTFISEKFGNQGDSLRFEQNNTTARYTLRGNGNSYNLYLRVSSIGNSTIRVTINGRVYTATNVNTTTNNDGVNDNGARFSDINIGNVVASSNSDVPLDINVTLNSGTQFDLMNIMLVPTNISPLY

SEQ ID NO: 265 - protein, 633 aa, Bacillus thuringiensis CMBL-BT1
MNTVLNNGRTTICDAYNVAAHDPFSFQHKSLDTVQKEWTEWKKNNHSLYLDPIVGTVASFLLKKVGSLVGKRILSELRNLIFPSGSTNLMQDILRETEKFLNQRLNTDTVARVNAELTGLQANVEEFNRQVDNFLNPNRNAVPLSITSSVNTMQQLFLNRLPQFQMQGYQLLLLPLFAQAANLHLSFIRDVILNADEWGISAATLRTYRDYLKNYTRDYSNYCINTYQSAFKGLNTRLHDMLEFRTYMFLNVFEYVSIWSLFKYQSLLVSSGANSYASGSGPQQTQSFTSQDWPFLYSLFQVNSNYVLNGFSGARLSNTFPNIVGLPGSTTTHALLAARVNYSGGISSGDIGASPFNQNFNCSTFLPPLLTPFVRSWLDSGSDREGVATVTNWQTESFETTLGLRSGAFTARGISNYFPDYFIRNISGVPLVVRNEDLRRPLHYNEIRNIASPSGTPGGARAYMVSVHNRKNNIHAVHENGSMIHLAPNDYTGFTISPIHATQVNNQTRTFISEKFGNQGDSLRFEQNNTTARYTLRGNGNSYNLYLRVSSIGNSTIRVTINGRVYTATNVNTTTNNDGVNDNGARFSDINIGNVVASSNSDVPLDINVTLNSGTQFDLMNIMLVPTNLPPLY

SEQ ID NO: 266 - protein, 633 aa, Bacillus thuringiensis LyD
MNSVLNSGRTTICDAYNVAAHDPFSFQHKSLDTVQKEWTEWKKNNHSLYLDPIVGTVASFLLKKVGSLVGKRILSELRNLIFPSGSTNLMQDILRETEKFLNQRLNTDTLARVNAELTGLQANVEEFNRQVDNFLNPNRNAVPLSITSSVNTMQQLFLNRLPQFQMQGYQLLLLPLFAQAANLHLSFIRDVILNADEWGISAATLRTYRDYLKNYTRDYSNYCINTYQSAFKGLNTRLHDMLEFRTYMFLNVFEYVSFWSVFKYQSLLVSSGANLNARGRGPQQAQSFTSPGWAFLNSLFQVNSNYVFNGFRGARLFNSFPNIIGLPGFTTTHPLLAAKVNYKGRISSGDIGASPVNQNFNCSKFLPPLLTPFVRSWLDSGSDREGVATVTNWQTESFETTLGLRSGAFTARGNSNYFPDYFIRNISGVPLVVRNEDLRRPLHYNEIRNIASPSGTPGGARAYMVSVHNRKNNIHAVHENGSMIHLAPNDYTGFTISPIHATQVNNQTRTFISEKFGNQGDSLRFEQNNTTARYTLRGNGNSYNLYLRVSSIGNSTIRVTINGRVYTATNVNTTTNNDGVNDNGARFSDINIGNVVARSNSDVSLDINVSLNSRTLIDLMNIMLVPTNISPLY

SEQ ID NO: 267 - protein, 633 aa, Bacillus thuringiensis ywc5-4
MNSVLNIGRTTICDAYNVAAHDPFSFQHKSLDTVQKEWTEWKKNNHSLYLDPIVGTVASFLLKKVGSLVGKRILSELRNLIFPSGSTNLMQDILRETEKFLNQRLNTDTLARVNAELTGLQANVEEFNRQVDNFLNPNRNAVPLSITSSVNTMQQLFLNRLPQFQMQGYQLLLLPLFAQAANLHLSFIRDVILNADEWGISAATLRTYRDYLKNYTRDYSNYCINTYQSAFKGLNTRLHDMLEFRTYMFLNVFEYVSIWSLFKYQSLLVSSGANLYASGSGPQQTQSFTSQDWPFLYSLFQVNSNYVLNGFSGARLSNTFPNIVGLPGSTTTHALLAARVNYSGGISSGDIGASPFNQNFNCSTFLPPLLTPFVRSWLDSGSDREGVATVTNWQTESFETTLGLRSGAFTARGNSNYQSDYFIRNISGVPLVVRNEDLRRPLHYNEIRNIASPSGTPGGARAYLVSVHNRKNNIHAVHENGSLIHLAPNDYTGFTISPIHATQVNNQTRTFISEKFGNQGDSLRFEQNNTTARYTLRGNGNSYNLYLRVSSIGNSTIRVTINGRVYTATTVNTTTNNDGVNDNGARFSDINIGNVVASSNSDVPLDINVTLNSGTQFDLMNIMLVPTNISPLY

SEQ ID NO: 268 - protein, 633 aa, Bacillus thuringiensis Bts
MNSVLNTGRTTICDAYNVAAHDPFSFQHKSLDTVQKEWTEWKKNNHSLYLDPIVGTVASFLLKKVGSLVGKRILSELRNLIFPSGSTNLMQDILRETEKFLNQRLNTDTLARVNAELTGLQADVEEFNRQVDNFLNPNRNAVPLSITSSVNTMQQLFLNRLPQFQMQGYQLLLLPLFAQAANLHLSFIRDVILNADEWGISAATLRTYRDYLKNYTRDYSNYCINTYQSAFKGLNTRLHDMLEFRTYMFLNVFEYVSIWSLFKYQSLLVSSGANLYASGSGPQQTQSFTSQDWPFLYSLFQVNSNYVLNGFSGARLSNTFPNIVGLPGSTTTHALLAARVNYSGGISSGDIGASPFNQNFNCSTFLPPLLTPFVRSWLDSGSDREGVATVTNWRTESFETTLGLRSGAFTARGNSNYYSDYFIRNISGVPLVVRNEDLRRPLHYNEIRNIASPSGTPGGARAYLVSVHNRKNNIHAVHENGSLIHLAPNDYTGFTISPIHATQVNNQTRTFISEKFGNQGDSLRFEQNNTTARYTLRGNGNSYNLYLRVSSIGNSTIRVTINGRVYTATTVNTTTNNDGVNDNGARFSNINIGNVVASSNSDVPLDINVTLNSGTQFDLMNTMLVPTNISPLY

SEQ ID NO: 269 - protein, 634 aa, Bacillus thuringiensis BF-4
MNSVLNSGRTTICDAYNVAAHDPFSFQHKSLDTVQKEWTEWKKNNHSLYLDPIVGTVASFLLKKVGSLVGKRILSELRNLIFPSGSTNLMQDILRETEKFLNQRLNTDTLARVNAELTGLQANVEEFNRQVDNFLNPNRNAVPLSITSSVNTMQQLFLNRLPQFQMQGYQLLLLPLFAQAANLHLSFIRDVILNADEWGISAATLRTYRDYLKNYTRDYSNYCINTYQSAFKGLNTRLHDMLEFRTYMFLNVFEYVSIWSLFKYQSLLVSSGANLYASGSGPQQTQSFTSQDWPFLYSLFQVNSNYVLNGFSGARLSNTFPNIVGLPGSTTTHALLAARVNYSGGISSGDIGASPFNQNFNCSTFLPPLLTPFVRSWLDSGSDREGVATVTNWQTESFETTLGLRSGAFTARGNSNYFPDYFIRNISGVPLVVRNEDLRRPLHYNEIRNIASPSGTPGGARAYMVSVHNRKNNIHAVHENGSMIHLAPNDYTGFTISPIHATQVNNQTRTFISEKFGNQGDSLRFEQNNTTARYTLRGNGNSYNLYLRVSSIGNSTIRVTINGRVYTATNVNTTTNNDGVNDNGARFSDINIGNVVASSNSECTSLDINVTLNSGTQFDLMNIMLVPTNISPLY

SEQ ID NO: 270 - protein, 633 aa, Bacillus thuringiensis SK-793; identical to SEQ ID NO: 264

SEQ ID NO: 271 - protein, 633 aa, Bacillus thuringiensis kurstaki HD1; identical to SEQ ID NO: 264

SEQ ID NO: 272 - protein, 633 aa, Bacillus thuringiensis; identical to SEQ ID NO: 264

SEQ ID NO: 273 - protein, 633 aa, Bacillus thuringiensis BTC002; identical to SEQ ID NO: 264

SEQ ID NO: 274 - protein, 633 aa, Bacillus thuringiensis B-Pr-88
MNSVLNSGRTTICDAYNVAAHDPFSFQHKSLDTVQKEWTEWKKNNHSLYLDPIVGTVASFLLKKVGSLVGKRILSELRNLIFPSGSTNLMQDILRETEKFLNQRLNTDTVARVNAELTGLQANVEEFNRQVDNFLNPNRNAVPLSITSSVNTMQQLFLNRLPQFQMQGYQLLLLPLFAQAANLHLSFIRDVILNADEWGISAATLRTYRDYLKNYTRDYSNYCINTYQSAFKGLNTRLHDMLEFRTYMFLNVFEYVSIWSLFKYQSLLVSSGANLYASGSGPQQTQSFTSQDWPFLYSLFQVNSNYVLNGFSGARLSNTFPNIVGLPGSTTTHALLAARVNYSGGISSGDIGASPFNQNFNCSTFLPPLLTPFVRSWLDSGSDREGVATVTNWQTESFETTLGLRSGAFTARGISNYFPDYFIRNISGVPLVVRNEDLRRPLHYNEIRNIASPSGTPGGARAYMVSVHNRKNNIHAVHENGSMIHLAPNDYTGFTISPIHATQVNNQTRTFISEKFGNQGDSLRFEQNNTTARYTLRGNGNSYNLYLRVSSIGNSTIRVTINGRVYTATNVNTTTNNDGVNDNGARFSDINIGNVVASSNSDVPLDINVTLNSGTQFDLMNIMLVPTNISPLY

SEQ ID NO: 275 - protein, 633 aa, Bacillus thuringiensis ly30
MNSVLNSGRTTICDAYNVAAHDPFSFQHKSLDTVQKEWTEWKKNNHSLYLDPIVGTVASFLLKKVGSLVGKRILSELRNLIFPSGSTNLMQDILRETEKFLNQRLNTDTLARVNAELTELQANVEEFNRQVDNFLNPNRNAVPLSITSSVNTMQQLFLNRLPQFQMQGYQLLLLPLFAQAANLHLSFIRDVILNADEWGISAATLRTYRDYLKNYTRDYSNYCINTYQSAFKGLNTRLHDMLEFRTYMFLNVFEYVSIWSLFKYQSLLVSSGANLYASGSGPQQTQSFTSQDWPFLYSLFQVNSNYVLNGFSGARLSNTFPNIVGLPGSTTTHALLAARVNYSGGISSGDIGASPFNQNFNCSTFLPPLLTPFVRSWLDSGSDREGVATVTNWQTESFETTLGLRSGAFTARGNSNYFPDYFIRNISGVPLVVRNEDLRRPLHYNEIRNIASPSGTPGGARAYMVSVHNRKNNIHAVHENGSMIHLAPNDYTGFTISPIHATQVNNQTRTFISEKFGNQGDSLRFEQNNTTARYTLRGNGNSYNLYLRVSSIGNSTIRVTINGRVYTATNVNTTTNNDGVNDNGARFSDINIGNVVASSNSDVPLDINVTLNSGTQFDLMNIMLVPTNISPLY

SEQ ID NO: 276 - protein, 633 aa, Bacillus thuringiensis WZ-7
MNSVLNSGRTTICDAYNVAAHDPFSFQHKSLDTVQKEWTEWKKNNHSLYLDPIVGTVASFLLKKVGSLVGKRILSELRNLIFPSGSTNLMQDILRETEKFLNQRLNTDTLARVNAELTGLQANVEEFNRQVDNFLNPNRNAVPLSITSSVNTMQQLFLNRLPQFQMQGYQLLLLPLFAQAANLHLSFIRDVILNADEWGISAATLRTYRDYLKNYTRDYSNYCINTYQSAFKGLNTRLHDMLEFRTYMFLNVFEYVSIWSLFKYQSLLVSSGANLYASGSGPQQTQSFTSQDWPFLYSLFQVNSNYVLNGFSGARLSNTFPNIVGLPGSTTTHALLAARVNYSGGISSGDIGASPFNQNFNCSTFLPPLLTPFVRSWLDSGSDREGVATVTNWQTESFETTLGLRSGAFTARGNSNYFPDYFIRNISGVPLVVRNEDLRRPLHYNGIRNIASPSGTPGGARAYMVSVHNRKNNIHAVHENGSMIHLAPNDYTGFTILPIHATQVNNQTRTFISGKFGNQGDSLRFEQNNTTARYTLRGNGNSYNLYLRVSSIGNSTIRVTINGRVYTATNVNTTTNNDGVNDNGARFSDINIGNVVASSNSDVPLDINVTLNSGTQFDLMNIMLVPTNISPLY

SEQ ID NO: 277 - protein, 633 aa, Bacillus thuringiensis WB2
MNSVLNSGRTTICDAYNVAAHDPFSFQHKSLDTVQKEWTEWKKNNHSLYLDPIVGTVASFLLKKVGSLVGKRILSELRNLIFPSGSTNLMQDILRETEKFLNQRLNTDTLARVNAELTGLQANVEEFNRQVDNFLNPNRNAVPLSITSSVNTMQQLFLNRLPQFQMQGYQLLLLPLFAQAANLHLSFIRDVILNADEWGISAATLRTYRDYLKNYTRDYSNYCINTYQSAFKGLNTRLHDMLEFRTYMFLNVFEYVSIWSLFKYQSLLVSSGANLYASGSGPQQTQSFTSQDWPFLYSLFQVNSNYVLNGFSGARLSNTFPNIVGLPGSTTTHALLAARVNYSGGISSGDIGASPFNQNFNCSTFLPPLLTPFVRSWLDSGSDREGVATVTNWQTESFETTLGLRSGAFTVRGNSNYFPDYFIRNISGVPLVVRNEDLRRPLHYNEIRNIASPSGTPGGARAYMVSVHNRKNNIHAVHENGSMIHLAPNDYTGFTISPIHATQVNNQTRTFISEKFGNQGDSLRFEQNNTTARYTLRGNGNSYNLYLRVSSIGNSTIRVTINGRVYTATNVNTTTNNDGVNDNGARFSDINIGNVVASSNSDVPLDINVTLNSGTQFDLMNIMLVPTNLPPLY

SEQ ID NO: 278 - protein, 633 aa, Bacillus thuringiensis LLB6
MNNVLNSGRTTICDAYNVAAHDPFSFQHKSLDTVQKEWTEWKKNNHSLYLDPIVGTVASFLLKKVGSLVGKRILSELRNIIFPSGSTNLMQDILRETEKFLNQRLNTDTVARVNAELTGLQANVEEFNRQVDNFLNPNRNAVPLSITSSVNTMQQLFLNRLPQFQMQGYQLLLLPLFAQAANLHLSFIRDVILNADEWGISAATLRTYRDYLKNYTRDYSNYCINTYQSAFKGLNTRLHDMLEFRTYMFLNVFEYVSIWSLFKYQSLLVSSGANLYASGSGPQQTQSFTSQDWPFLYSLFQVNSNYVLNGFSGARLSNTFPNIVGLPGSTTTHALLAARVNYSGGISSGDIGASPFNQNFNCSTFLPPLLTPFVRSWLDSGSDREGVATVTNWQTESFETTLGLRSGAFTARGISNYFPDYFIRNISGVPLVVRNEDLRRPLHYNEIRNIASPSGTPGGARAYMVSVHNRKNNIHAVHENGSMIHLAPNDYTGFTISPIHATQVNNQTRTFISEKFGNQGDSLRFEQNNTTARYTLRGNGNSYNLYLRVSSIGNSTIRVTINGRVYTATNVNTTTNNDGVNDNGARFSDINIGNVVASSNSDVPLDINVTLNSGTQFDLMNIMLVPTKLPPLY

SEQ ID NO: 279 - protein, 622 aa, Bacillus thuringiensis shanghai S1
MNTVLNNGRNTTCHAHNVVAHDPFSFEHKSLNTIEKEWKEWKRTDHSLYVAPIVGTVGSFLLKKVGSLVGKRILSELQNLIFPSGSIDLMQEILRATEQFINQRLNADTLGRVNAELAGLQANVAEFNRQVDNFLNPNQNPVPLAIIDSVNTLQQLFLSRLPQFQIQGYQLLLLPLFAQAANFNLSFIRGVILNADEWGISAATVRTYRDHLRKFHRDYSNYCINPYQTAFRGLNHRLPDMLEFRTYMFLNVFEYVSIWSLFKYQSLLVSSGANLYASGSGPTQSFTAQNWPFLYSLFQVNSNYVLNGLSGARTTITFPNIGGLPVYHNSTLHFARINYRGGVSSSRIGQANLNQNFNISTLFNPLQTPFIRSWLDSGTDREGVATSTNWQSGAFETTLLRFSIFSARGNSNFFPDYFIRNISGVVGTISNADLARPLHFNEIRDIGTTAVASLVTVHNRKNNIYDTHENGTMIHLAPNDYTGFTVSPIHATQVNNQIRTFISEKYGNQGDSLRFELSNPTARYTLRGNGNSYNLYLRVSSIGSSTIRVTINGRVYTANVNTTTNNDGVLDNGARFSDINIGNVVASANTNVPLDIQVTFNGNPQFELMNIMFVPTNLPPLY

SEQ ID NO: 280 - protein, 623 aa, Bacillus thuringiensis QCL-1
MNTVLNNGRNTTCHAPNVVAHDPFSFEHKSLNTIEKEWKEWKRTDHSLYVAPIVGTVGSFLLKKVGSLVGKRILSELQNLIFPSGSIDLMQEILRATEQFINQRLNADTLGRVNAELAGLQANVAEFNRQVDNFLNPNQNPVPLAIIDSVNTLQQLFLSRLPQFQIQGYQLLLLPLFAQAANLHLSFIRDVILNADEWGISAATVRTYRDHLRNFTRDYSNYCINTYQTAFRGLNTRLHDMLEFRTYMFLNVFEYVSIWSLFKYQSLLVSSGANLYASGSGPTQSFTAQNWPFLYSLFQVNSNYVLNGLSGARTTITFPNIGGLPGSTTTQTLHFARINYRGGVSSSRIGQANLNQNFNISTLFNPLQTPFIRSWLDSDTDREGVATSTNWQSGAFETTLLRFSIFSARGNSNFFPDYFIRNISGVVGTISNADLARPLHFNEIRDIGTTAVASLVTVHNRKNNIYDTHENGTMIHLAPNDYTGFTVSPIHATQVNNQIRTFISEKYGNQGDSLRFELSNTTARYTLRGNGNSYNLYLRVSSIGSSTIRVTINGRVYTANVNTTTNNDGVLDNGARFSDINIGNVVASANTNVPLDIQVTFNGNPQFELMNIMFVPTNLPPLY

SEQ ID NO: 281 - protein, 623 aa, Bacillus thuringiensis HD29
MNTVLNNGRNTTCHAHNVVAHDPFSFEHKSLNTIEKEWKEWKRTDHSLYVAPIVGTVGSFLLKKVGSLVGKRILSELQNLIFPSGSIDLMQEILRATEQFINQRLNADTLGRVNAELAGLQANVAEFNRQVDNFLNPNQNPVPLAIIDSVNTLQQSFLSRLPQFQIQGYQLLLLPLFAQAANLHLSFIRDVILNADEWGISAATVRTYRDHLRNFTRDYSNYCINTYQTAFRGLNTRLHDMLEFRTYMFLNVFEYVSIWSLFKYQSLLVSSGANLYASGSGPTQSFTAQNWPFLYSLFQVNSNYVLNGLSGARTTITFPNIGGLPGSTTTQTLHFARINYRGGVSSSRIGQANLNQNFNISTLFNPLQTPFIRSWLDSGTDREGVATSTNWQSGAFETTLLRFSIFSARGNSNFFPDYFIRNISGVVGTISNADLARPLHFIEIRDIGTTAVASLVTVHNRKNNIYDTHENGTMIHLAPNDYTGFTVSPIHATQVNNQIRTFISEKYGNQGDSLRFELSNTTARYTLRGNGNSYNLYLRVSSIGSSTIRVTINGRVYTANVNTTTNNDGVLDNGARFSDINIGNVVASANTNVPLDIQVTFNGNPQFELMNIMFVPTNLPPLY

SEQ ID NO: 282 - protein, 623 aa, Bacillus thuringiensis CMBL-BT3
MNTVLNNGRNTTCHAHNVVAHDPFSFEHKSLNTIEKEWKEWKRTDHSLYVAPIVGTVGSFLLKKVGSLVGKRILSELQNLIFPSGSIDLMQEILRATEQFINQRLNADTLGRVNAELAGLQANVAEFNRQVDNFLNPNQNPVPLAIIDSVNTLQQLFLSRLPQFQIRGYQLLLLPLFAQAANLHLSFIRDVILNADEWGISAATVRTYRDHLRNFTRDYSNYCINTYQTAFRGLNTRLHDMLEFRTYMFLNVFEYVSIWSLFKYQSLLVSSGANLYASSSGPTQSFTAQNWPFLYSLFQVNSNYVLNGLSGARTTITFPNIGGLPGSTTTQTLHVARINYRGGVSSSRIGQANLNQNFNISTLFNPLQTPFIRSWLDSGTDREGVATSTNWQSGAFETTLLRFSIFSARGNSNFFPDYFIRNISGVVGTISNADLARPLHFNEIRDIGTTAVASLVTVHNRKNNIYDTHENGTMIHLAPNDYTGFTVSPIHATQVNNQIRTFISEKYGNQGDSLRFELSNTTARYTLRGNGNSYNLYLRVSSIGSSTIRVTINGRVYTANVNTTTNNDGVLDNGARFSDINIGNVVASANTNVPLDIQVTFNGNPQFELMNIMFVPTNLPPLY

SEQ ID NO: 283 - protein, 623 aa, Bacillus thuringiensis
MNTVLNNGRNTTCHAHNVVAHDPFSFEHKSLNTIEKEWKEWKRTDHSLYVAPIVGTVGSFLLKKVGSLVGKRILSELQNLIFPSGSIDLMQEILRATEQFINQRLNADTLGRVNAELAGLQANVAEFNRQVDNFLNPNQNPVPLAIIDSVNTLQQLFLSRLPQFQIQGYQLLLLPLFAQAANLHLSFIRDVILNADEWGISAATVRTYRDHLRNFTRDYSNYCINTYQTAFRGLNTRLHDMLEFRTYMFLNVFEYVSIWSLFKYQSLLVSSGANLYASGSGPTQSFTAQNWPFLYSLFQVNSNYVLNGLSGARTTITFPNIGGLPGSTTTQTLHFARINYRGGVSSSRIGQANLNQNFNISTLFNPLQTPFIRSWLDSGTDREGVATSTNWQSGAFETTLLRFSIFSARGNSNFFPDYFIRNISGVVGTISNADLARPLHFNEIRDIGTTAVASLVPVHNRKNNIYATHENGTMIHLAPNDYTGFTVSPIHATQVNNQIRTFISEKYGNQGDSLRFELSNTTARYTLRGNGNSYNLYLRVSSIGSSTIRVTINGRVYTANVNTTTNNDGVLDNGARFSDINIGNVVASANTNVPLDIQVTFNGNPQFELMNIMFVPTNLPPLY

SEQ ID NO: 284 - protein, 625 aa, Bacillus thuringiensis
MNTVLNNGRNTTCHAHNVVAHDPFSFEHKSLNTIEKEWKEWKRTDHSLYVAPIVGTVGSFLLKKVGSLVGKRILSELQNLIFPSGSIDLMQEILRATEQFINQRLNADTLGRVNAELAGLQANVAEFNRQVDNFLNPNQNPVPLAIIDSVNTLQQLFLSRLPQFQIQGYQLLLLPLFAQAANLHLSFIRDVILNADEWGISAATVRTYRDHLRNFTRDYSNYCINTYQTAFRGLNTRLHDMLEFRTYMFLNVFEYVSIWSLFKYQSLLVSSGANLYASGSGPTQSFTAQNWPFLYSLFQVNSNYVLNGLSGARTTITFPNIGGLPGSTTTQTLHFARINYRGGVSSSRIGQANLNQNFNISTLFNPLQTPFIRSWLDSGTDREGVATSTNWQSGAFETTLLRFSIFSARGNSNFFPDYFIRNISGVVGTISNADLARPLHFNEIRDIGTTAVASLVTVHNRKNNIYDTHENGTMIHLAPNDYTGFTVSPIHATQVNNQIRTFISEKYGNQGDSLRFELSNTTARYTLRGNGNSYNLYLRVSSIGSSTIRVTINGRVYTANVNTTTNNDGVLDNGARFSDINIGNVVASANTNVPLDIQVTFNDNPQFELMNIMLFQLIFHHFIKV

SEQ ID NO: 285 - protein, 623 aa, Bacillus thuringiensis WB9
MNSVLNSGRNTTCHAHNVVAHDPFSFEHKSLNTIEKEWKEWKRTDHSLYVAPIVGTVGSFLLKKVGSLVGKRILSELQNLIFPSGSIDLMQEILRATEQFINQRLNADTLGRVNAELAGLQANVAEFNRQVDNFLNPNQNPVPLAIIDSVNTLQQLFLSRLPQFQIQGYQLLLLPLFAQAANLHLSFIRDVILNADEWGISAATVRTYRDHLRNFTRNYSNYCINTYQTAFRGLNTRLHDMLEFRTYMFLNVFEYVSIWSLFKYQSLLVSSGANLYASGSGPTQSFTAQNWPFLYSLFQVNSNYVLNGLSGARTTITFPNIGGLPGSTTTQTLHFARINYRGGVSSSRIGQANLNQNFNISTLFNPLQTPFIRSWLDSGTDREGVATSTNWQSGAFETTLLRFSIFSARGNSNFFPDYFIRNISGVVGTISNADLARPLYFNEIRDIGTTAVASLVTVHNRKNNIYDTHENGTMIHLAPNDYTGFTVSPIHATQVNNQIRTFISEKYGNQGDSLRFELSNTTARYTLRGNGNSYNLYLRVSSIGSSTIRVTINGRVYTANVNTTTNNDGVLDNGARFSDINIGNVVASANTNVPLDIQVTFNGNPQFELMNIMFVPTNIPPLY

SEQ ID NO: 286 - protein, 623 aa, Bacillus thuringiensis
MNNVLNSGRNTTCHAHNVVAHDPFSFEHKSLNTIEKEWKEWRRTDHSLYVAPIVGTVGSFLLKKVGSLVGKRILSELQNLIFPSGSIDLMQEILRATEQFINQRLNADTLGRVNAELAGLQANVAEFNRQVDNFLNLNQNPVPLAIIDSVNTLQQLFLSRLPQFQIQGYQLLLLPLFAQAANLHLSFIRDVILNADEWGISAATVRTYRDHLRNFTRDYSNYCINTYQTAFRGLNTRLHDMLEFRTYMFLNVFEYVSIWSLFKYQSLLVSSGANLYASGSGPTQSFTAQNWPFLYSLFQVNSNYVLNGLSGARTTITFPNIGGLPGSTTTQTLHFARINYRGGVSSSRIGQANLNQNFNISTLFNPLQTPFIRSWLDSGTDREGVATSTNWQSGAFETTLLRFSIFSARGNSNFFPDYFIRNISGVVGTISNADLARPLHFNEIRDIGTTAVASLVTVHNRKNNIYDTHENGTMIHLAPNDYTGFTVSPIHATQVNNQIRTFISEKYGNQGDSLRFELSNTTARHTLRGNGNSYNLYLRVSSIGSSTIRVTINGRVYTANVNTTTNNDGVLDNGARFSDINIGNVVASANTNVPLDIQVTFNGNPQFELMNIMFVPTNIPPLY

SEQ ID NO: 287 - protein, 623 aa, Bacillus thuringiensis wuhanensis
MNTVLNNGRNTTCHAHNVVAHDPFSFEHKSLNTIEKEWKEWKRTDHSLYVAPIVGTVGSFLLKKVGSLVGKRILSELQNLIFPSGSIDLMQEILRATEQFINQRLNADTLGRVNAELAGLQANVAEFNRQVDNFLNPNQNPVPLAIIDSVNTLQQLFLSRLPQFQIQGYQLLLLPLFAQAANLHLSFIRDVILNADEWGISAATVRTYRDHLRNFTRDYSNYCINTYQTAFRGLNTRLHDMLEFRTYMFLNVFEYVSIWSLFKYQSLLVSSGANLYASGSGPTQSFTAQNWPFLYSLFQVNSNYVLNGLSGARTTITFPNIGGLPGSTTTQTLHFARINYRGGVSSSRIGQANLNQNFNISTLFNPLQTPFIRSWLDSGTDREGVATSTNWQSGAFETTLLRFSIFSARGNSNFFPDYFIRNISGVVGTISNADLARPLHFNEIRDIGTTAVASLVTVHNRKNNIYDTHENGTMIHLAPNDYTGFTVSPIHATQVNNQIRTFISEKYGNQGDSLRFELSNTTARYTLRGNGNSYNLYLRVSSIGSSTIRVTINGRVYTANVNTTTNNDGVLDNGARFSDINIGNVVASANTNVPLDIQVTFNGNPQFELMNIMFVPTNLPPLY

SEQ ID NO: 288 - protein, 623 aa, Bacillus thuringiensis SBSBT-1
MNTVLNNGRNTTCHAHNVVAHDPFSFEHKSLNTIEKEWKEWKRTDHSLYVAPIVGTVGSFLLKKVGSLVGKRILSELQNLIFPGGSIDLMQEILRATEQFINQRLNADTLGRVNAELAGLQANVAEFNRQVDNFLNPNQNPVPLAIIDSVNTLQQLFLSRLPQFQIQGYQLLLLPLFAQAANLHLSFIRDVILNADEWGISAATVRTYRDHLRNFTRDYSNYCINTYQTAFRGLNTRLHDMLEFRTYMFLNVFEYVSIWSLFKYQSLLVSSGANLYASGSGPTQSFTAQNWPFLYSLFQVNSNYVLNGLSGARTTITFPNIGGLPGSTTTQTLHFARINYRGGVSSSRIGQANLNQNFNISTLFNPLQTPFIRSWLDSGTDREGVATSTNWQSGAFETTLLRFSIFSARGNSNFFPDYFIRNISGVVGTISNADLARPLHFNEIRDIGTTAVASLVTVHNRKNNIYDTHENGTMIHLAPNDYTGFTVSPIHATQVNNQIRTFISEKYGNQGDSLRFELSNTTARYTLRGNGNSYNLYLRVSSIGSSTIRVTINGRVYTANVNTTTNNDGVLDNGARFSDINIGNVVASANTNVPLDIQVTFNGNPQFELMNIMFVPTNLPPLY

SEQ ID NO: 289 - protein, 623 aa, Bacillus thuringiensis CMBL-BT1
MNTVLNNGRNTTCHAHNVVAHDPFSFEHKSLNTIEKEWKEWKRTDHSLYVAPIVGTVGSFLLKKVGSLVGKRILSELQNLIFPSGSIDLMQEILRATEQFINQRLNADTLGRVNAELAGLQANVAEFNRQVDNFLNPNQNPVPLAIIDSVNTLQQLFLSRLPQFQIQGYQLLLLPLFAQAANLHLSFIRDVILNADEWGISAATVRTYRDHLRNFTRDYSNYCIDTYQTAFRGLNTRLHDMLEFRTYMFLNVFEYVSIWSLFKYQSLLVSSGANLYASGSGPTQSFTAQNWPFLYSLFQVNSNYVLNGLSGARTTITFPNIGGLPGSTTTQTLHFARINYRGGVSSSRIGQANLNQNFNISTLFNPLQTPFIRSWLDSGTDREGVATSTNWQSGAFETTLLRFSIFSARGNSNFFPDYFIRNISGVVGTISNADLARPLHFNEIRDIGTTAVASLVTVHNRKNNIYDTHENGTMIHLAPNDYTGFTVSPIHATQVNNQIRTFISEKYGNQGDSLRFELSNTTARYTLRGNGNSYNLYLRVSSIGSSTIRVTINGRVYTANVNTTTNNDGVLDNGARFSDINIGNVVASANTNVPLDIQVTFNGNPQFELMNIMFVPTNLPPLY

SEQ ID NO: 290 - protein, 623 aa, Bacillus thuringiensis CMBL-BT2
MNTVLNNGRNTTCHAHNVVAHDPFSFEHKSLNTIEKEWKEWKRTDHSLYVAPIVGTVGSFLLKKVGSLVGKRILSELQNLIFPSGSIDLMQEILRATEQFINQRLNADTLGRVNAELAGLQANVAEFNRQVDNFLNPNQNPVPLAIIDSVNTLQQLFLSRLPQFQIQGYQLLLLPLFAQAANLHLSFIRDVILNADEWGISAATVRTYRDHLRNFTRDYSNYCINTYQTAFRGLNTRLHDMLEFRTYMFLNVFEYVSIWSLFKYQSLLVSSGANLYASGSGPTQSFTAQNWPFLYSLFQVNSNYVLNGLSGARTTITFPNIGGLPGSTTTQTLHFARINYRGGVSSSRIGQANLNQNFNISTLFNPLQTPFIRSWLDSGTDREGVATSTNWQSGAFETTLLRFSIFSARGNSNFFPDYFIRNISGVVGTISNADLARPLHFNEIRDIGTTAVASLVTVHNRKNNIYDTHENGTMIHLAPNDYTGFTVSPIHATQVNNQIRTFISEKYGNQGDSLRFELSNTTARYTLRGNGNSYNLYLRVSSIGSSTIRVTINGRVYTANVNTTTNNDGVLDNGARFSDINIGNVVASANTNVPLDIQVTFNGNPQFEFMNIMFVPTNLPPLY

SEQ ID NO: 291 - protein, 633 aa, Bacillus thuringiensis BR30
MNSVLNSGRNTICDAYNVVVHDPFSFQHKSLDTIQKEWMEWKKDNHSLYVDPIVGTVASFLLKKLGSLIGKRILSELRNLIFPSGSTNLMEDILRETEKFLNQKLNTDTLSRVNAELTGLQANVEEFNRQVDNFLNPNRNAVPLSITSSVNTMQQLFLNRLSQFQMQGYQLLLLPLFAQAANLHLSFIRDVILNAEEWGISAATLRTYQNHLRNYTRDYSNYCIDTYQTAFRGLNTRLHDMLEFRTYMFLNVFEYVSIWSLFKYQSLLVSSGANLYASGSGPQQTQLFTSQDWPFLYSLFQVNSNYVLSGFSGASLFTTFPNIGGLPGSTTTQALLAARVNYSGGITSGSIGGSNFNQNFNCNTISPPLSTSFVRSWLDSGSDRQGVNTVTNWQTESFETTSGLRCGAFTPRGNSNYYPGYFIRNISGVSLVLRNEDLKRPLYYNEKRNIESPSGTPGGARAYMVSVHNKKNNIYAVHENGTMIHLAPEDNTGFTISPIHATQVNNQTRTFISEKFGNQGDSLRFEQSNTTARYTLRGNGNSYNLYLRVSSIGNSTIRVTINGRVYTASNVNTTTNNDGVNDNGARFSDINIGNVVASSNSDVPLDINVTLNSGTQFDLMNIMLVPTNISPLY

SEQ ID NO: 292 - protein, 633 aa, Bacillus thuringiensis WB10
MNSVLNSGRTTICDAYNVVVHDPFSFQHKSLDTIQKEWMEWKKDNHSLYVDPIVGTVASFLLKKLGSLIGKRILSELRNLIFPSGSTNLMEDILRETEKFLNQKLNTDTLSRVNAELTGLQANVEEFNRQVDNFLNPNRNAVPLSITSSVNTMQQLFLNRLSQFQMQGYQLLLLPLFAQAANLHLSFIRDVILNAEEWGISAATLRTYQNHLRNYTRDYSNYCIDTYQTAFRGLNTRLHDMLEFRTYMFLNVFEYVSIWSLFKYQSLLVSSGANLYASGSGPQQTQLFTSQDWPFLYSLFQVNSNYVLSGFSGASLFTTFPNIGGLPGSTTTQALLAARVNYSGGITSGSIGGPNFNQNFNCNTISPPLSTSFVRSWLDSGSDRQGVNTVTNWQTESFETTSGLRCGAFTPRGNSNYYPGYFIRNISGVSLVLRNEDLKRPLYYNEKRNIESPSGTPGGARAYMVSVHNKKNNIYAVHENGTMIHLAPEDNTGFTISPIHATQVNNQTRTFISEKFGNQGDSLRFEQSNTTARYTLRGNGNSYNLYLRVSSIGNSTIRVTINGRVYTASNVNTTTNNDGVNDNGARFSDINIGNVVASSNSDVPLDINVTLNSGTQFDLMNIMLVPTNLPPLY

SEQ ID NO: 293 - protein, 633 aa, Bacillus thuringiensis 5_2AcT(1)
MNTVLNNGRNTICDAYNVVVHDPFSFQHKSLDTIQKEWMEWKKDIHSLYVDPIVGTVASFLLKKLGSLIGKRILSELRNLIFPSGSTNLMEDILRETEKLLNQKLNTDTLSRVNAELTGLQANVEEFNRQVDNFLNPNRNAVPLSITSSVNTMQQLFLNRLSQFQMQGYQLLLLPLFAQAANLHLSFIRDVILNAEEWGISAATLRTYQNHLRNYTRDYSNYCIDTYQTAFRGLNTRLHDMLEFRTYMFLNVFEYVSIWSLFKYQSLLVSSGANLYASGSGPQQTQLFTSQDWPFLYSLFQVNSNYVLSGFSGASLFTTFPNIGGLPGSTTTQALLAARVNYSGGITSGSIGGSNFNQNFNCNTISPPLPTSFVRGWLDSGSDRQGVNTVTNWQTESFEATSGLRCGAFTPRGNSNYYPGYFIRNISGVSLVLRNEDLKRPLYYNEKRNIESPSGTPGGARAYMVSVHNKKNNIYAVHENGTMIHLAPEDNTGFTISPIHATQVNNQTRTFISEKFGNQGDSLRFEQSNTTARYTLRGNGNSYNLYLRVSSIGNSTIRVTINGRVYTASNVNTTTNNDGVNDNGARFSDINIGNVVASSNSDVPLDINVTLNSGTQFDLMNIMLVPTNLPPLY

SEQ ID NO: 294 - protein, 633 aa, Bacillus thuringiensis CMBL-BT2
MNTVLNNGRNTICDAYNVVVHDPFSFQHKSLDTIQKEWMEWKKDNHSLYVDPIVGTVASFLLKKLGSLIGKRILSELRNLIFPSGSTNLMEDILRETEKFLNQKLNTDTLSRVNAELTGLQANVEEFNRQVDNFLNPNRNAVPLSITSSVNTMQQLFLNRLSQFQMQGYQLLLLPLFAQAANLHLSFIRDVILNAEEWGISAATLRTYQNHLRNYTRDYSNYCIDTYQTAFRGLNTRLHDMLEFRTYMFLNVFEYVSIWSLFKYQSLLVSSGANLYASGSGPQQTQLFTSQDWPFLYSLFQVNSNYVLSGFSGASLFTTFPNIGGLPGSTTTQALLAARVNYSGGITSGSIGGSNFNQNFNCNTISPPLSTSFVRSWLDSGSDRQGVNTVTNWQTESFETTSGLRCGAFTPRGNSNYYPGYFIRNISGVSLVLRNEDLKRPLYYNEKRNIESPSGTPGGARAYMVSVHNKKNNIYAVHENGTMIHLAPEDNTGFTISPIHATQVNNQTRTFISEKFGNQGDSLRFEQSNTTARYTLRGNGNSYNLYLRVSSIGNSTIRVTINGRVYTASNVNTTTNNDGVNDNGARFSDINIGNVVASSNSDVPLDINVTLNSGTQFDLMNIMLVPTNLPPLY

SEQ ID NO: 295 - protein, 633 aa, Bacillus thuringiensis HD29
MNSVLNSGRTTICDAYNVAAHDPFSFQHKSLDTVQKEWTEWKKNNHSLYLDPIVGTVASFLLKKVGSLVGKRILSELRNLIFPSGSTNLMQDILRETEKFLNQRLNTDTVARVNAELTGLQANVEEFNRQVDNFLNPNRSAVPLSITSSVNTMQQLFLNRLPQFQMQGYQLLLLPLFAQAANLHLSFIRDVILNAEEWGISAATLRTYRDYLKNYTRDYSNYCIDTYQTAFRGLNTRLHDMLEFRTYMSLNVFEYVSIWSLFKYQSLLVSSGANLYASGSGPQQTQLFTSQDWPFLYSLFQVNSNYVLSGFSGASLFTTFPNIGGLPGSTTTQALLAARVNYSGGITSGSIGGSNFNQNFNCNTISPPLSTSFVRSWLDSGSDRQGVNTATNWQTESFETTSGLRCGAFTPRGNSNYYPGYFIRNISGVSLVLRNEDLKRPLYYNEKRNIESPSGTPGGARAYMVSVHNKKNNIYAVHENGTTIHLAPEDNTGFTISPIHATQVNNQTRTFISEKFGNQGDSLRFEQSNTTARYTLRGNGNSYNLYLRVSSIGNSTIRVTINGRVYTASNVNTTTNNDGVNDNGARFSDINIGNVVASSNSDVPLDINVTLNSGTQFDLMNIMLVPTNISPLY

SEQ ID NO: 296 - protein, 632 aa, Bacillus thuringiensis
MNNVLNNGRTTICDAYNVVAHDPFSFEHKSLDTIRKEWMEWKRTDHSLYVAPIVGTVSSFLLKKVGSLIGKRILSELWGLIFPSGSTNLMQDILRETEQFLNQRLNTDTLARVNAELEGLQANIREFNQQVDNFLNPTQNPVPLSITSSVNTMQQLFLNRLPQFRVQGYQLLLLPLFAQAANMHLSFIRDVVLNADEWGISAATLRTYQNYLKNYTTEYSNYCINTYQTAFRGLNTRLHDMLEFRTYMFLNVFEYVSIWSLFKYQSLLVSSGANLYASGSGPQQTQSFTSQDWPFLYSLFQVNSNYVLNGFSGARLTQTFPNIGGLPGTTTTHALLAARVNYSGGVSSGDIGAVFNQNFSCSTFLPPLLTPFVRSWLDSGSDRGGVNTVTNWQTESFESTLGLRCGAFTARGNSNYFPDYFIRNISGVPLVVRNEDLRRPLHYNEIRNIESPSGTPGGLRAYMVSVHNRKNNIYAVHENGTMIHLAPEDYTGFTISPIHATQVNNQTRTFISEKFGNQGDSLRFEQSNTTARYTLRGNGNSYNLYLRVSSLGNSTIRVTINGRVYTASNVNTTTNNDGVNDNGARFLDINMGNVVASDNTNVPLDINVTFNSGTQFELMNIMFVPTNLPPIY

SEQ ID NO: 297 - protein, 626 aa, Bacillus thuringiensis C81
MNSVLNSGRTTICDAYNVVAHDPFSFQHKSLDTIQKEWTEWKKNNHSLYVDPIVGTVGSFLLKKVGSLIGKRILSELLNLIFPSGNTNLMQDILRETEKLLNQRLNADTLNRVNAELRGLEANVNEFNRQVDNFLNPNRNAVPLSITSSVNTMQQLFLSRLPQFQIQGYQLLLLPLFAQAANLHLSFIRDVILNADEWGISAATLRTYRDHLRNYTRDYSNYCINTYQTAFRGLNTRLHDMLEFRTYMFLNVLDYVSIWSLFKYQSLLVSSGANLYACGNSPNTQSFTAQDWPFLYSLFQVNSNYILSGLSGSRSTITLPVIGPFPGTTTTQTLHNARINYRGGISSGLIGSSNLNQNFNITPIFNPLLTPFIRSWLDSGIDREGLATTTNWMTGSFETTIGLRFSIFTARGNSNYFPDYFIRNISGVVRDLRNEDLRKPLHFNEIRNIGTTPVSSLVSVHNRKNNIYAVHENGSMIHLMPKDYTGFTISPIHATHVNNQNRTFISEKFGNQGDSLRFEQSNTTARYTFRGNGNSYNLYLRVSSLGNSTIRVTINGRVYTATNVNTTTNNDGVNDNGAHFSDINIGNVVASSNTDVPLDINVTFNSGAQFDLMNIMLVPTNISPLY

SEQ ID NO: 298 - protein, 626 aa, Bacillus thuringiensis SK-758
MNSVLNSGRTTICDAYNVVAHDPFSFQHKSLDTIQKEWTEWKKNNHSLYVDPIVGTVGSFLLKKVGSLIGKRILSELLNLIFPSGDTNLMQDILRETEKLLNQRLNADTLNRVNAELRGLEANVNEFNRQVDNFLNPNRDAVPLSITSSVNTMQQLFLSRLPQFQIQGYQLLLLPLFAQAANLHLSFIRDVILNADEWGISAATLRTYRDHLRNYTRDYSNYCINTYQTAFRGLNTRLHDMLEFRTYMFLNVLDYVSIWSLFKYQSLLVSSGANLYACGNSPNTQSFTAQDWPFLYSLFQVNSNYILSGLSGSRSTITLPVIGPFPGTTTTQTLHNARINYRGGISSGLIGSSNLNQNFNITPIFNPLLTPFIRSWLDSGIDREGLATTTNWMTGSFETTIGLRFSIFTARGNSNYFPDYFIRNISGVVRDLRNEDLRKPLHFNEIRNIGTTPVSSLVSVHNRKNNIYAVHENGSMIHLMPKDYTGFTISPIHATHVNNQNRTFISEKFGNQGDSLRFEQSNTTARYTFRGNGNSYNLYLRVSSLGNSTIRVTINGRVYTATNVNTTTNNDGVNDNGAHFSDINIGNVVASSNTDVPLDINVTFNSGAQFDLMNIMLVPTNISPLY

SEQ ID NO: 299 - protein, 634 aa, Bacillus thuringiensis JF19-2
MNSVLNTGRTTICDAYNVAAHDPFSFQHKSLDTVQKEWTEWKKNNHSLYLDPIVGTVASFLLKKVGSLVGKRILSELRNLIFPSGSTNLMQDILRRDTKNSCIKDLIQTLLPVYMRNWHGLQADVEEFNRQVDNSLNPNRNAVPLSITSSVNTLQHLFLNRLPQFQLQGYQLLLLPLFAQAANLHLSFIRDVILNADEWGISAATLRTYRDYLKNYTRDYSNYCINTYQSAFKGLNTRLHDLLEFRTYLFLNVFEYVSIWSLFKYQSLLVSSGANLSASGSGPQQTQSFTSQDWPFLYSLFQVNSNYVLNGFSGARLSNTFPNIVGLPGSTTTHALLAARVNYSGGISSGDIGASPFNQNFNCSTFLPPLLTPFVRSWLDSGSDRERVATVTNWRTESFETTLGLRSGAFTARGNSNYYSDYFIRNISGVPLVVRNEDLRRPLHYNEIRNIASPSGTPGGARAYLVSVHNRKNNIHAVHENGSLIHLAPTDYTGFTISPIHATQANNQTRTFISEKFGNQGDSLRFEQNNTTARYTLRGNGNSYNLYLRVSSIGNSTIRVTINGRVYTATTVNTTTNNDGVNDNGARSSNINIGNVVASSNPDVPLDINVTLNSGTQFDLMNTMLVPTNISPLY

SEQ ID NO: 300 - protein, 632 aa, Bacillus thuringiensis SC6H8
MNNVLNSGRATNGDAYNVVAHDPFSFQHKSLDTIQEEWMEWKKDNHILYVDPIVGTVASFLLKKVGSLVEKRILSELRNLIFPSGSTNLMQDILRETEKFLNQRLNTDTLARVNAELTGLQANVEEFNRQVDNFLNPNRNAVPLSITSSVNTMQQLFLNRLPQFQMQGYQLLLLPLFAQAANLHLSFIRDVILNADEWGISAATLRTYQNHLRNYTREYSNYCITTYQTAFRGLNTRLHDMLEFRTYMFLNVFEYVSIWSLFKYQSLLVSSGANLYASGSGPQQTQSFTSQDWPFLYSLFQVNSNYVLNGFSGARLTQTFPNIVGLPGTTTTHALLAARVNYSGGVSSGDIGAVFNQNFSCSTFLPPLLTPFVRSWLDSGSDRGGINTVTNWQTESFETTLGLRSGAFTARGNSNYFPDYFIRNISGVPLVVRNEDLRRPLHYNQIRNIESPSGTPGGLRAYMVSVHNRKNNIYAVHENGTMIHLAPEDYTGFTISPIHATQVNNQTRTFISEKFGNQGDSLRFEQSNTTARYTLRGNGNSYNLYLRVSSIGNSTIRVTINGRVYTASNVNTTTNNDGVNDNGARFSDINIGNVVASDNTNVPLDINVTLNSGTQFELMNIMFVPTNLPPLY

SEQ ID NO: 301 - protein, 632 aa, Bacillus thuringiensis BRC-ZQL3
MNSVLNSGRTTICDAYNVAAHDPFSFQHKSLDTVQKEWTEWKKNNHSLYLDPIVGTVASFLLKKVGSLVGKRILSELRNLIFPSGSTNLMQDILRETEKFLNQRLNTDTLARVNAELTGLQANVEEFNRQVDNFLNPNRNAVPLSITSSVNTMQQLFLNRLPQFQMQGYQLLLLPLFAQAANLHLSFIRDVILNADEWGISAATLRTYRDYLKNYTRDYSNYCINTYQSAFKGLNTRLHDMLEFRTYMFLNVFEYVSIWSLFKYQSLLVSSGANLYASGSGPQQTQSFTSQDWPFLYSLFQVNSNYVLNGFSGARLTQTFPNIVGLPGTTTTHALLAARVNYSGGVSSGDIGAVFNQNFSCSTFLPPLLTPFVRSWLDSGSDRGGINTVTNWQTESFETTLGLRSGAFTARGNSNYFPDYFIRNISGVPLVVRNEDLRRPLHYNQIRNIESPSGTPGGLRAYMVSVHNRKNNIYAVHENGTMIHLAPEDYTGFTISPIHATQVNNQTRTFISEKFGNQGDSLRFEQSNTTARYTLRGNGNSYNLYLRVSSIGNSTIRVTINGRVYTASNVNTTTNNDGVNDNGARFSDINIGNVVASDNTNVPLDINVTLNSGTQFELMNIMFVPTNISPLY

SEQ ID NO: 302 - protein, 688 aa, Bacillus thuringiensis medellin
MNSYENKNEYEILDTSQKNSNMSNRYSKYPLTNNPKVPLQNTNYKDWLNMCQTITPLCTPIDTDSKLVATAIKVIGAIFKSMPGPGAAVGLVLKSFSTIIPILWPNDKTPIWKEFTKQGLQLFRPELGRDAIEIIGNDVQAEYNSLEIMMRDFENKFANWESNRTRANAIAVTTAFSTVNTQIIRLKERFLIAPENRPAFLNLYAQTANIDLILYQRGSVYGDKWVADINNRSTSPFSSKDYYQSLKGKIKDYTNYCAETYRNSLTILKNKPHIQWDIYNRYRREAILGALDLVALFPNYDICIYPTQTRTELTRKVYMPSFYLQALQQRDIETVENQLTHPPSLFTWLNELNLYTIRERFNPVLQVASLSGLQATSRYTQNTTTISNPVQGPVREGTPTKISLANYYIYKLFMSQYRHPNDCLPISGINEMSFYRSDYYGAGGPAPVHYSAGESPTNVIKTYMNGPQNALISNDISINETSHILSDIKMNYSRTGGVYPLYDFGYSFAWTHTSVDPDNLIVPNRITQIPAVKAYSLTSPARVIVGPGHTGGDLVALLNSGTQSGTMQIQCKTGSFTGPSRQYGLRMRYAANSAFTVSLSYTLLGQTRGTSFVTENTFSRSNNIIPTDLKYEEFKYKDYLQIITMTLPANTIITISMQQATGLLNNQLIIDRIEFYPMDQGVVACTVN

SEQ ID NO: 303 - protein, 683 aa, Bacillus thuringiensis entomocidus
MNPYQKKTEYEILDALPNYSNMVNAYSRYPLANNPQVPLQNTSYKDWLNMCQTINPLCTPINIDIDSLAASIAVVGSILALIPGPGEAIGFVLGTFSTILPILWPNGETKIWTDFAERGLQLFRPELGQDAIEILVTGVKSGYNALKNRMENFEQAFTKWKGNRTRSNAEQVIRDFDSVRDKVIDLKNDYMINPENKPAFINLYAQTANIDLILYQRGAVYGDDWEKDINGSISPFWGSKDYYESLKTKIEEYTNYCAETYRNSLNILKNKPNISWDTYNKYRREATLGALDLVALFPNYDMHLYPAATKTELTRKIYMPSFGLQQSNYFQSLEGLENALTHPPSLFTWLNELNLYTVRENFNPALQVSSLSGLQARSRYTQNPTILDNPAQGVRNGTSTQIGLNNLFVYKLSMSQYHHPNDCSSIAGISDMTFYKSDYNGNASATQTYQAGRNTNNVINTFMNGPQKASSSNNISIKQTKHILSDIKMIYFRTGGMYQVYDFGYSFAWTHTSVDPDNLIVPNRITQIPAVKALGISTDSKVVKGPVFIGGDLLLLKLQATIRIKTDHANTRYKIRVRYASNANTPIVLSSLQNTLTVTFPQTITHSTISELQYKDFQYVTFPGEFIMDKPSIDVAIRGVQNDRNDIWIDRIEFLPITQSVLDYTEEQNIEKSQKAVNDLFIN

SEQ ID NO: 304 - protein, 688 aa, Bacillus thuringiensis sotto
MNLYGNKNDSEILNASSNNSNMSTTYPKYPLAHSRQDSMENMNYKEWINQCETINTFCTPIDTDINSVAATIGAVGAILALIPGPGEAIGFVLSTFTSLIPYLWPSDTKKIWGDFTKQGLQLFRPELGNDAIEIIGNDVQSEYNSLKTFMQNFEDSFTDWKKYRNRATAVAVTNDFSSVRDQIIRLKDRFLINPENKPAFLILYAQTANFDLILYQRGALYADEWENDINRSISPLLGSKDYYISLAAKIKEYTNYCAETYRNSLNILKNKTNISWGTYNKYRREVTLGALDLAALFPNYDICIYPIQTKTELTRKVYMPSFGLQQSNYFQSLEGLENALTHPPSLFTWLNELNLYTIRENFNPALLVSSLSGLQAISRYTQNPNRISNPAQGVRNGTPTQIGLNNLFVYKLSLSQYHHPNECYSIAGISDMTFYKSDYNGNAPTTQTYQAGRNSNNFINTFMNGPQEASSSNNISIKQTNHILSDIKMIYSRTGGTYPSYDFGYSFAWTHTSVNPDNLIVPNRITQIPAVKADYLTSPAKVIAGPGHTGGDLVALLNAATQAGRMQIQCKTGSFTGASRRYGIRIRYAANNALTVSLSYTVQGGNTMSTTFITERTFLRPNNTIPTDLKYEEFKYKEYNQIITMTAPQNTIVTIAIQQLNAFPNDQLIIDRIEFYPMDQGVVPCTVN

SEQ ID NO: 305 - protein, 688 aa, Bacillus thuringiensis jegathesan 367
MNLYGNKNDSEILNASSNNSNMSTTYPKYPLAHSRQDSMQNMNYKEWINQCETINTFCTPINIDINSVAATIGAVGAILALIPGPGEAIGFVLSTFTSLIPYLWPSDTKKIWGDFTKQGLQLFRPELGNDAIEILGNDVQSEYNSLKTFMQNFEKSFAAWKIKRDRATAVAVTNDFSSVRDQIIRLKDRFLINPENKPAFLILYAQTANFDLILYQRGALYADEWENDINRSISPLLGSKDYYISLAAKIKEYTNYCAETYRNSLDILKNKPNISWDTYNKYRREVTLGALDLAALFPNYDICIYPIQTKTELTRRVYMPSFGLQQSNYFQSLEGLENALTHPPSLFTWLNELNLYTIRENFNPALLVSSLSGLQAISRYTQNPNRISNPDQGVRTGTPTQIGLNNLFVYKLSLSQYHHPNECYSIAGISDMTFYKSDYNGNAPTTQTYQAGRNSNNFINTFMNGPQEASSSNNISIKQTNHILSDIKMIYSRTGGTYPSSDFGYSFAWTHTSVNPDNLIVPNRITQIPAVKADYLTSPAKVIAGPGHTGGDLVALLNAATQAGRMQIQCKTGSFTGASRRYGIRIRYAANNALTVSLSYTVQGGNTMGTTFITERTFLRPNNTIPTDLKYEEFKYKEYNQIITMTAPQNTIVTIAIQQLNAFPNDQLIIDRIEFYPMDQGVVPCTVN

SEQ ID NO: 306 - protein, 684 aa, Bacillus thuringiensis Y41
MNPYQNTNECEILDDLPNYSKMVNAYSRYPLANNPEVPLQNTSYKDWLNMCQTITPLCTPIDSDINSIAAAIGVIGSILGLIPGPGEAIGLILGTFSSIIPFLWPENKSIIWEEFTHRGLHLIRPELTPTEIEIIVTPLKGYYNALREQLENFESEFAKWALEKSPANTRDVVLRFSAIDAAIINLKNQLIVDVRNKPAFLSLYAQTANIDLILFQRGDKYGDEWVKYARNQPIPFKTSQEYYNSLKDKIENYTNDIAETYRNGLNIIKNIPKISWDVFNLYRREMTLSALDLVALFLNYDIYRYPISTKTELTRKVYMSSFYLQALEQNESLESLENKPLPHSPSLFTWLKRLNLYTISEDYSIPLRVSSLSGLSAVYSHTHQQQALYTRPYQGVLVGQPQEIRFDGFVYKLFMSQNISPNSCYLIGGIPQMSFYISDYSGGLRPNKDYYSASASIYFINSYMNGPQNATKSNNISIRETKHILSDIKMNYSKTGGFYPFHTFGYSFAWTHTSVDPDNLIVPNRITQIPAVKAHYLSATAKVIAGPGHTGGDLVALINDGSRTGSMNIECKTGSFTQPSRRFGLRMRYAENNQFSVSILRDNQGVGTFNIERTFSRTNNIIPTDLKYNEFKYNNYDEITMDLPPNKIIDIRIQQTNSLSINQFIIDRIEFYPIDQGVEACKMQ

SEQ ID NO: 307 - protein, 684 aa, Bacillus thuringiensis aizawai BUN1-14
MNPYQNTNECEILDASPNYSKMGNAYSRYPLANNPQVPLQNTSYKDWLNMCQTITPLCTPIDPDINSVAAAIGVIGSIIGLIPGPGEAIGLILGTFSSIIPFLWPENKTIIWEEFTHRGLHLIRPELTPTEIEIIVNPLKGYYNALREQLENFESEFAIWARNKNAATTGDVLRRFSNIDADIIRLKHQLTVDVRNKPALLSLYAQTANIDLILFQRGAKYGDEWARYARNQPIPFKTSQEYYDSLKEKIENYTNDIAATYRNGLNIIKNIPKISWDVFNLYRREMTLSALDLVALFPNYDICRYPISTKTELTRKVYMSSFYLQALELNESLESLENKLTHPPSLFTWLKRLNLYTISENYSSPLRVSSLSGLSAVYSHTHQQQALYVGPPQGITGGSPQEIRFDGFVYKLFMSQNISPNGCYPIGGIPQMSFYISDYSGSPRPNKDYYSASAIQYISINSYMNGPQNATKSNNISIRETKHILSDIKMNYSQTGGFYPFHSFGYSFAWTHTSVDPDNLIVPNRITQIPAVKAHILSTTAKVIAGPGHTGGDLVALLNDDPRIGTMSIECKTGSFTQPSRRYGLRMRYAANNQFSVSISRNDQGVASFVTERTFSRTNNIIPTDLKYNEFKYNNYDQIIMDLPPNTIINIGIRQTNALSINQFIIDRIEFYPMDQGVEACKMQ

SEQ ID NO: 308 - protein, 688 aa, Bacillus thuringiensis S2160-1
MNSYQNTNEYEILDASQKNSTMSNRYPRCPLANNPQVPLQNTSYKDWLNMCQTITPLCTPVETVSDYVAAFIGVPGSIFGAMPGPGAAVGLFLSSFSTIIPILWPNDTTPIWKEFTKQGLQLFRPELGRDAIEIIGNDVQAEYNALKTMMQDFETKFATWDLNRTRANAIAATTEFNSVKNQIIRLQERFLIAAENRPAFLNLYAQTANIDLILYQRGAANGDKWLEDINNRSISPFSSKDYYQDLKLKIKNYTNYCAETYRNSLNILKNKSDIQWSIYNGYRRVATLGALDLVALFPNYDICIYPIQTQTELTRKVYMPSFYSERLPKGNIETWENSLTHPPSLFTWLKKLDPYTKSERFNPALEVASLCGLHAALSYTPQNGPEFAGPFQGILGTKTTPLISFDNQFVYELFLTQYRHPNDCYSISGKPKITFYISDYYGNSRPNKEYSSNIQLSSVITSYMNGPQNASTSNNISIKQTKHILSDIKMIYTQIGGIYPSHDFGYSFAWTHTSVDPDNLIVPNRITQIPAVKAYSLTSPARVIAGPGHTGGDLVALLNNNLEAGRMQIQCKTGSFTGASRRYGLRMRYAANSQFTVNLSYVLSGTTYGTSFITESTFSRLNNIIPTDLKYEEFKYKEYSQIITMTLPANTIITISIQQAVASSNYQLIIDRIELYPMDQDVVACTVN

SEQ ID NO: 309 - protein, 688 aa, Bacillus thuringiensis Ywc2-8
MNSYQNTNEYEILDASQKNSTMSNRYPRCPLANNPQVPLQNTSYKDWLNMCQTITPLCTPVETDSDYVAAFIGVLGSIFGAMPGPGAAVGLFLSSFSTIIPILWPNDTTPIWKEFTKQGLQLFRPELGRDAIEIIGNDVQAEYNALKTMMQDFETKFATWDLNRTRANAIAVTTEFNSVKNQIIRLQERFLIAAENRPAFLNLYAQTANIDLILYQRGAANGDKWLEDINNRSISPFSSKDYYQDLKLKIKNYTNYCAETYRNSLNILKNKSDIQWSIYNGYRRVATLGALDLVALFPNYDICIYPIQTQTELTRKVYMPSFYSERLPKGNIETWENSLTHPPSLFTWLKKLDPYTKSERFNPALEVASLCGLHAALSYTPQNGPEFAGPFQGILGTKTTPLISFDNQFVYKLFLTQYRHPNDCYSISGIPKITFYISDYYGNSRPNKEYSSNIQLSSVITSYMNGPQNASTSNNISIKQTKHILSDIKIIYTQIGGIYPSHDFGYSFAWTHTSVDPDNLIVPNRITQIPAVKAYSLTSPARVIAGPGHTGGDLVALLNNNLEAGRMQIQCKTGSLTGASRRYGLRMRYAANSQFTVNLSYVLSGTTYGTSFITESTFSRLNNIIPTDLKYEEFKYKEYSQIITMTLPANTIITISIQQAVASSNYQLIIDRIEFYPMDQGVVACTVN

SEQ ID NO: 310 - protein, 687 aa, Bacillus thuringiensis MC28
MKPYQSENEYEILDTLPKYSNIVNVYSRYPLANNPQVPLQNTSYKDWLNMCQTITPLCTPIDIDSKLVATAIGILGAIFKAMPGPGSAVGLFLKTFSTIIPILWPNDNTPIWKEFTKQGLQLFRPELGRDAIEIIGNDVQSGFNALKDHMNDFETKFEIWDKDRTQTNATYLITAFGVVNGKIIDLKNQFLINPANQPAFLNLYAQTANIDLILYQRGAVYGDDWAKAINDSSISPFNSSQIFYDSLKAKIKEYTNYCAETYRNSLTILKNQPNIQWDIYNRYRREATLGALDLVALFPNYDICKYPISTKTELTRKVYMPSFYLQALQHSNIETLENQLTHPPSLFTWLNELNLYTIRENFNPALQVSSLSGLQAKYRYTQNSTILPNPPAQGITNGTPIPIIGLNNLFIYKLSMSQYRHPNDCVPIAGISDMTFYKSDYNGNASATQTYQAGRNSNNVIDTFMNGPQNASSSNNISINQTNHILSDIKMNYARSGGVYDFGYSFAWTHTSVDLDNLIVPNRITQIPAVKANFLSSPARVIAGPGHTGGDLVALLNGGTQAGKMQIQCKTGSSTGASRRYGIRMRYAANNAFTVSLSYTLQGGNTIGTTFITERTFSRPNNIIPTDLKYEEFKYKEYNQIITVTSPQNTIVTIAIRQLNPIPNDQLIIDRIEFYPVDQDAFACPVN

SEQ ID NO: 311 - protein, 664 aa, Bacillus thuringiensis HS18-1
MNLYQNENEYKILDVLPNYSNMVNAYSSYPLANNPQVPLQNTSYKDWLNMCQTITPLCTTIDSDINSVAAAIGVIASIIGLIRGPGEAIGLILGTFSSIIPFLWPENKTIIWEEFTHRGLNLIRPELTPAEIEIILNPLKGSYNALREQLVNFEREFAIWAGAKNQATTGDLLRRISAIEGAIIQLKNQLTVSEANKPALLSLYAQTANIDLILFQRGAKYGDEWAKYARNQPIPFKTSREYYASLIEKIKTYTNDIAGTYRNGLNKIKNIQNISWDTFNEYRRGMTLSALDLVALFPNYDICIYPIQTKTELTRKIYMPSFYLQALQQSGNLESLENQLTHPPSLFTWLNELNLYTISENFNPAILPNPAQGITGGTPIPIGLNNLFIYKLSMSQYHDPNGCYPIAGISDMTFYKSDYNGNASTTQPYHAGRNSNNVIDTFMNGPQNASSSNNISIKETKHILSDIKMVYSRSGVYSLGYSFAWTCTSVNPDNLIVPNRITQIPAVKANLLNSPARVIAGPGHTGGDLVALLNSGTQSGRMEIKCKTGSFTETSRRYGIRMRYAANNAFTVSLSYTLQGGNPIGITFGTERTFLRTNNIIPTDLKYEEFKYKEYNQIITMTAPQNTIVTIAVYQSTPSLNNQLIIDRIEFYPMDQGVEACKMN

SEQ ID NO: 312 - protein, 664 aa, Bacillus thuringiensis S2160-1
MNLYQNENEYKILDVLPNYSNMVNAYSRYPLANNPQVPLQNTSYKDWLNMCQTITPLCTTIDSDINSVAAAIGVIASIIGLIRGPGEAIGLILGTFSSIIPFLWPENKTIIWEEFTHRGLNLIRPELTPAEIEIILNPLKGSYNALREQLVNFEREFAIWAGAKNQATTGDLLRRISAIEGAIIQLKNQLTVSEANKPALLSLYAQTANIDLILFQRGAKYGDEWAKYARNQPIPFKTSREYYASLTEKIKTYTNDIAGTYRNGLNKIKNIQNISWDTFNEYRREMTLSALDLVALFPNYDICIYPIQTKTELTRKIYMPSFYLQALQQSGNLESLENQLTHPPSLFTWLNELNLYTISENFNPAILPNPAQGITGGTPIPIGLNNLFIYKLSMSQYHDPNGCYPIAGISDMTFYKSDYNGNASTTQPYHAGRNSNNVIDTFMNGPQNASSSNNISIKETKHILSDIKMVYSRSGVYSFGYSFAWTYTSVDPDNLIVPNRITQIPAVKANLLNSPARVIAGPGHTGGDLVALLNSGTQSGRMEIKCKTGSFTGASRRYGIRMRYAANNAFTVSLSYTLQGGNPIGITFGTERTFLRTNNIIPTDLKYEEFKYKEYNQIITMTAPQNTIVTIAVYQSTPSLNNQLIIDRIEFYPMDQGVEACKMN

SEQ ID NO: 313 - protein, 723 aa, Bacillus thuringiensis 84-HS-1-11
MDPFSNYSEQKYPDSNNNQELITKSSSFYSDTTNENAKNYHPIEQDILKFTNQEFSDNHYQHSDVSNDINSMRNTLCKDLPPETNMSIYDNLRSTVTVPSFSNQFDPIKFLHDIEIAIQTGSFSALTQSNMNQGGTDINPMLISTFFKVASSLLPFPLSSLGALASFYVTDSQTGAMANLWRQMVDYVEKRIDSKILDYHNFIMGAELAALNASLKEYARVVKIFENDMNRMAEPPSTGVITQFRILNDNFIKYIAKLQFSTNQSDLQYPVLTLPLRAQACVMHLMLLKDATTSVWGQQIDSQQLNGYKAELIRLIKVYTNDVNTTYNQGLELEKAKPLNYSDPEEYLQAGRPDISVLRSNFKEVMKWNRVAKYKRGMAMSALSLAALFPTFGPNYPKQALKVVQSRQIFAPVIGIPGGITSQDHSGTFGSMRFDVKTYDQIDALRRLMELYIQPLKSAYFYIYESDWKVRATYVNDYIGKRGSNTGLAWGMWSSDPSVIYTSALGAAGYAPNVVGVRYSHGGSYTKGMAPPNTNAYAPFEFKYPGYKLHSVSAYGLSKAPDTADSVMFGFRPVLLENEANQLLTDTALQIPAEIGITDVVPAFGRTEEPINGQDAIIIWESFTSGFGFTYTVDSPQKQKYKIIYRIANNLSASTVSLTYNNQTFFTDILNTSLDPNGVRGNYGSYTLVEGPIIEFSQGTNIFKLRSQKGEFAIDSIIFSPVS

SEQ ID NO: 314 - protein, 742 aa, Bacillus thuringiensis M15
MDPFSNYSEQKYPDSNNNQELITESSSFYSDTTNENMKTYHPIEQDILKFANQEFPDNYYQHSDVSNSYQNMKTEIVNTDLPYNTNNINSMRNTLCRDLPPETNMSIYDNLRSTVTVPSFSNQFDPIKFLHDIEIAIETGSFSALTQSNMNQGGTDIAPMLISTFFKVAGSLLPFPLSSLGALASFYVTDSQTGAMANLWRQMVDYVEKRIDSKILDYHNFIMGAELAALNASLKEYARVVKIFENDMNRIAEPPSTGVITQFRILNDNFIKYIAKLQFSTNQSDLQYPVLTLPLRAQACVMHLMLLKDATTSVWGQQIDSQQLNGYKAELIRLIKVYTNDVNTTYNQGLELEKAKPLNYSDPEEYLQAGRPDISVLRSNFKEVMKWNKVAKYKRGMAMSALSLAALFPTFGPNYPKQALKVVQSRQIFAPVIGIPGGITSQDSGPTFGSMRFDVKTYDQIDALRQLMELYIQPLKSAYFWIYESDWKVRATYVNDYIGKRGSNTGAAWHMWSSDPSAIYTSALGAAGYAPNVVGVRYSHGGSYTKGMAPANTNAYAPFEFKYPGYKLHSVSAYGLSKAPDAADSVMFGFRPVLLENEANQLLTDTALQIPAEIGITDVVPAFGRTEEPINGQDAIRIWESFTSGFGFTYTVDSPQKQKYKIIYRIANNLSASTVSLTYNNQTFFTDILNTSLDPNGVRGNYGSYTLVEGPIIEFSQGTNIFKLGSQKGEFAIDSIIFSPVV

SEQ ID NO: 315 - protein, 723 aa, Bacillus thuringiensis B0195; identical to SEQ ID NO: 313

SEQ ID NO: 316 - protein, 723 aa, Bacillus thuringiensis 79-25
MDPFSNYSEQKYPDSNNNQELITKSSSFYSDTTNENAKNYHPIEQDILKFTNQEFSDNHYQHSDVSNDINSMRNTLCKDLPPETNMSIYDNLRSTVTVPSFSNQFDPIKFLHDIEIAIQTGSFSALTQSNMNQGGTDINPMLISTFFKVASSLLPFPLSSLGALASFYVTDSQTGAMANLWRQMVDYVEKRIDSKILDYHNFIMGAELAALNASLKEYARVVKIFENDMNRMAEPPSTGVITQFRILNDNFIKYIAKLQFSTNQSDLQYPVLTLPLRAQACVMHLMLLKDATTSVWGQQIDSQQLNGYKAELIRLIKVYTNDVNTTYNQGLELEKAKPLNYSDPEEYLQAGRPDISVLRSNFKEVMKWNRVAKYKRGMAMSALSLAALFPTFGPNYPKQALKVVQSRQIFAPVIGIPGGITSQDHSGTFGSMRFDVKTYDQIDALRRLMELYIQPLKSAYFYIYESDWKVRATYVNDYIGKRGSNTGLAWGMWSSDPSVIYTSALGAAGYAPNVVGVRYSHGGSYTKGMAPPNTNAYAPFEFKYPGYKLHSVSAYGLSKAPDTADSVMFGFRPVLLENEANQLLTDTALQIPAEIGITDVVPAFGRTEEPINGQDAIIIWESFTSGFGFTYTVDSPQKQKYKIIYRIANNLSASTVSLTYNNQTFFTDILNTSLDPNGVRGNYGSYTLVEGPIMEFSQGTNIFRLRSQKGEFAIDSIIFSPVS

SEQ ID NO: 317 - protein, 723 aa, Bacillus thuringiensis 92-10
MDPFSNYSEQKYPDSNNNQELITKSSSFYSDTTNENAKNYHPIEQDILKFTNQEFSDNHYQHSDVSNDINSMRNTLCKDLPPETNMSIYDNLRSTVTVPSFSNQFDPIKFLHDIEIAIQTGSFSALTQSNMNQGGTDINPMLISTFFKVASSLLPFPLSSLGALASFYVTDSQTGAMANLWRQMVDYVEKRIDSKILDYHNFIMGAELAALNASLKEYARVVKIFENDMNRMAEPPSTGVITQFRILNDNFIKYIAKLQFSTNQSDLQYPVLTLPLRAQACVMHLMLLKDATTSVWGQQIDSQQLNGYKAELIRLIKVYTNDVNTTYNQGLELEKAKPLNYSDPEEYLQAGRPDISILRSNFKEVMKWNRVAKYKRGMAMSALSLAALFPTFGPNYPKQALKVVQSRQIFAPVIGIPGGITSQDHSGTFGSMRFDVKTYDQIDALRRLMELYIQPLKSAYFWIYESDWKVRATYVNDYIGKRGSNTGAAWHMWSSDPSVIYTSALGAAGYAPNVVGVRYSHGGSYTKGMAPPNTNAYAPFEFKYPGYKLHSVSAYGLSKAPDAADSVMFGFRPVLLENEANQLLTDTALQIPAEIGITDVVPAFGRTEEPINGQDAIIIWESFTSGFGFTYTVDSPQKQKYKIIYRIANNLSASTVSLTYNNQTFFTDILNTSLDPNGVRGNYGSYTLVEGPIIEFSQGTNIFKLRSQKGEFAIDSIIFSPVS

SEQ ID NO: 318 - protein, 754 aa, Bacillus thuringiensis M019
MSVVYHVKGGDIVDPFSNYSAQKYPDSNNNQELTTKSSLFYSDTTNGNVKNYHPIEQDILKFTNQEFSDNSYRHSDVSNSYENKKKEIINIDLPYNTNDINSMRNTLCRDLPPETNMSIYDNLRSAVTVPSFSNQFDPIKFLHDIEIAIQTGSFSALTQSNMNQGGTDINPMLISTFFKVASSLLPFPLSSLGALASFYITDSQTGAMANLWRQMVDYVEKRIDSKILDYHNFIMGAELAALNASLKEYARVVKIFENDMNRMAEPPSTGVITQFRILNDNFIKYIAKLQFSTNQSDLQYPVLTLPVRAQACVMHLMLLKDATTSVWGQQIDSQQLNGYKAELIRLIKVYTNDVNTTYNQGLELEKAKPLNYSDPEEYLQAGRPDISVLRSNFREVMKWNRVAKYKRGMAMSALSLAALFPTFGPNYPKQALKVVQSRQIFAPVIGIPGGITSQDSGPTFGSMRFDVKTYDQIDALRQLMELYIQPLKSAYFWIYESDWKVRATYVNDYIGKRGSNTGAAWHMWSSDPSAIYTSALGAAGYAPNVVGVRYSNGGSYTKGMAPANTNAYAPFEFKYPGYKLHSVSAYGLSKAPDAADSVMFGFRPVLLENEANQLLTDTALQIPAEIGITDVVPAFGRTEEPINGQDAIRIWESFTTGLGFTYTVDSPQKQKYKIIYRIANNLSASTVSLTYNNQTFFTDILNTSLDPNGVRGNYGSYTLVEGPIIEFSQGTNIFKLRSQKGEFAIDSIIFSPVV

SEQ ID NO: 319 - protein, 726 aa, Bacillus thuringiensis B0195
MEKFSNFSEQKYPDSNNNQELTVESSSFYSNTINENVKNHHPIEQDILKFTNQEFSDNHYQHSDVSNDINSMRNTLCRDLPPETNMSIYDNLRSTVTVPSFSNQFDPIKFLHDIEIAIQTGSFSALTQSNMNQGGTDINPMLISTFFKVASSLLPFPLSSLGALASFYITDSQTGAMANLWRQMVDYVEKRIDSKILDYHNFIMGAELAALNASLKEYARVVKIFENDMNRMAEPPSTGVITQFRILNDNFIKYIAKLQFSTNQSDLQYPVLTLPLRAQACVMHLMLLKDATTSVWGQQIDSQQLNGYKAELIRLIKVYTNDVKTTYNQGLELEKAKPLNYSDPEEYLQAGRPDISVLRSNFKEVMKWNRVAKYKRGMAMSALSLAALFPTFGPNYPKQALKVVQSRQIFAPVIGIPGGITSQDHSGTFGSMRFDVKTYDQIDALRRLMELYIQPLKSAYFWIYESDWKVRATYVNDYIGKRGSDTGAAWHMWSSDPSVIYTSALGAAGYAPNVVGVRYSHGGSYTKGMAPANTNAYAPFEFKYPGYKLHSVSAYGLSKAPNAADSVMFGFRPVLLENEANQLLTDTALQIPAEITEKIPNVSLDNYLVEETINGQNAIQLWEPTFPGDPKNRFNYTINSPREQNYKIIYRIASNEPAQISLTYNSKFLTDIPNTSLDPNGVKGNYGFYTLIEGPIIRFSSGTNIFSIRSEINTFAIDSIIFSPVS

SEQ ID NO: 320 - protein, 726 aa, Bacillus thuringiensis 31-5
MDPFSNYSEQKYPDSNNNQELTVESSSFYSNTINENVKNHHPIEQDILKFTNQEFSDNHYQHSDVSNDINSMRNTLCRDLPPETNMSIYDNLRSTVTVPSFSNQFDPIKFLHDIEIAIQTGSFSALTQSNMNQGGTDINPMLISTFFKVASSLLPFPLSSLGALASFYITDSQTGAMANLWRQMVDYVEKRIDSKILDYHNFIMGAELAALNASLKEYARVVKIFENDMNRMAEPPSTGVITQFRILNDNFIKYIAKLQFSTNQSDLQYPVLTLPLRAQACVMHLMLLKDATTSVWGQQIDSQQLNGYKAELIRLIKVYTNDVNTTYNQGLELEKAKPLNYSDPEEYLQAGRPDISVLRSNFKEVMKWNRVAKYKRGMAMSALSLAALFPTFGPNYPKQALKVVQSRQIFAPVIGIPGGITSQDHSGTFGSMRFDVKTYDQIDALRRLMELYIQPLKSAYFWIYESDWKVRATYVNDYIGKRGSDTGAAWHMWSSDPSVIYTSALGAAGYAPNVVGVRYSHGGSYTKGMAPANTNAYAPFEFKYPGYKLHSVSAYGLSKAPNAADSVMFGFRPVLLENEANQLLTDTALQIPAEITEKIPNISLDNYLVEETINGQNAIQLLEPTFPGDPKNRFNYTINSPREQNYKIIYRIASNEPAQISLTYNSKFLTDIPNTSLDPNGVKGNYGSYTLIEGPIIRFSSGTNIFSIRSEINTFAIDSIIFSPVS

SEQ ID NO: 321 - protein, 777 aa, Bacillus thuringiensis 87-29
MDPFSSYSEQKYPDSNNNQELITKSSSFYSDTTNENAKNYHPIEQDILKFTNQEFSDNPYQHSDVSNSYENKKKEIINIDLPYNTNDINSMRNTLCRDLPPETNMSIYDNLRSTVTVPSFSNQFDPIKFLHDIEIAIQTGSFSALTQSNMNQGGTDINPMLISAFFKVAGSLLPFPLSSLGALASFYVTDSQTGAMANLWRQMVDYVEKRIDSKILDYHNFIMGAELAALNASLKEYARVVKIFENDMNRIAEPPSTGVITQFRILHDNFIKYIAKLQFSTNQSDLQYPVLTLPLRAQACVMHLMLLKDATTSVWGQQIDSQQLNGYKAELIRLIKVYTNDVNTTYNQGLELEKAKPLNYSDPEEYLQAGRPDISVLRSNFKEVMKWNRVAKYKRGMAMSALSLAALFPTFGPNYPKQALKVVQSRQIFAPVIGIPGGITSQDHSGTFGSMRFDVKTYDQIDALRRLMELYIQPLKSAYFYIYESDWKVRATYVNDYIGKRGSNTGLAWGMWSSDPSVIYTSALGAAGYAPNVVGVRYSHGGSYTKGMAPPNTNAYAPFEFKYPGYKLHSVSAYGLSKAPDAADSVMFGFRPVLLENEANQLLTDTALQIPAEIGITDVVPAFGRTEEPINGQDAIILKKITRGPIPGGSTDCSPWELTHGMCEIDPGPPVPPGPPVPLPHRINYTINSPESGKEYTIWYRLASNQNSLIALQHRISQYDTNISNTQQDTNSVKGNYGYYTLIKGPTLVLFKGENIISLGMLSGEIALDSIIFSPVS

SEQ ID NO: 322 - protein, 633 aa, Bacillus thuringiensis B0462
MNSVLNSGRTTICDAYNVAAHDPFSFQHKSLDTVQKEWTEWKKNNHSLYLDPIVGTVASFLLKKVGSLVGKRILSELRNLIFPSGSTNLMQDILRETEKFLNQRLNTDTVARVNAELTGLQANVEEFNRQVDNFLNPNRNAVPLSITSSVNTMQQLFLNRLPQFQMQGYQLLLLPLFAQAANLHLSFIRDVILNADEWGISAATLRTYRDYLKNYTRDYSNYCINTYQSAFKGLNTRLHDMLEFRTYMFLNVFEYVSIWSLFKYQSLLVSSGANLYASGSGPQQTQSFTSQDWPFLYSLFQVNSNYVLNGFSGARLSNTFPNIVGLPGSTTTHALLAARVNYSGGISSGDIGASPFNQNFNCSTFLPPLLTPFVRSWLDSGSDREGVATVTNWQTESFETTLGLRSGAFTARGISNYFPDYFIRNISGVPLVVRNEDLRRPLHYNEIRNIASPSGTPGGARAYMVSVHNRKNNTHAVHENGSMIHLAPNDYTGFTISPIHATQVNNQTRTFISEKFGNQGDSLRFEQNNTTARYTLRGNGNSYNLYLRVSSIGNSTIRVTINGRVYTATNVNTTTNNDGVNDNGARFSDINIGNVVASSNSDVPLDINVTLNSGTQFDLMNIMLVPTNISPLY

SEQ ID NO: 323 - protein, 758 aa, Bacillus thuringiensis MO19
MSVVYYVKGGDIVDPFSNYSEQKYPDSNNNQELITESSSFYSDTTNENMKTYHPIEQDILKFANQEFPDNYYQHSDVSNSYQNMKTEIVNTDLPYNTNNINSMRNTLCRDLPPETNMSIYDNLRSTVTVPSFSNQFDPIKFLHDIEIAIETGSFSALTQSNMNQGGTDIAPMLISTFFKVAGSLLPFPLSSLGALASFYVTDSQTGAMANLWRQMVDYVEKRIDSKILDYHNFIMGAELAALNASLKEYARVVKIFENDMNRIAEPPSTGVITQFRILNDNFIKYIAKLQFSTNQSDLQYPVLTLPLRAQACVMHLMLLKDATTSVWGQQIDSQQLNGYKAELIRLIKVYTNDVNTTYNQGLELEKAKPLNYSDPEEYLQAGRPDISVLRSNFREVMKWNKVAKYKRGMAMSALSLAALFPTFGPNYPKQALKVVQSRQIFAPVIGIPGGITSQDHSGTFGTMRFDVQTYDQIDALRQLMELYIQPLKSAYFYIYESDGKVRATYVNDYIGKRGSNTGAAWGMWSSDPSAIYTSALGAAGYAPNVVGVRYSNGGSYTKGMAPANTNAYAPFEFKYPGYKLHSVSAYGLSKAPDAADSVMFGFRPVLLENEANQLLTDIALQIPAEIALTRPNLNINQLLVEETINGQNALQLWEPNFPGDSTNIFNYNINSPREQNYKIIYRIASNSPAQISLNYNSKFFLTDIPNTSLDPNGVKGTYGSYTLIEGPIIRFSPGANIFSISSEINTFAIDSIIFSPVS

SEQ ID NO: 324 - protein, 1236 aa, Bacillus thuringiensis yunnanensis
MDPNDHNEYEVMDTGSMGYQPRYPLANAPGAELQQMHYKDWMDMCTYGESVALSEGLRAALFVANSIIGIMLSKIPIVGPIVSTPFQIMGVALPFLWPPNAPEPQFSWESLMTAAEEIADKKIDAQVRANANAELEGVHNAIRLYQDAVCDWKQDPTNAQLKEQLRIQYIATNTVIFSRMPSFRVRGFEVPLLSTYVQAANLHLIHLKDGVQFGEEWGMDSATVDRFYSYLKSDIEIYTNYCIDWYNKGLSDSIESEPTWNGWNTFNNFRRDMTLMVLDLVSIWPTYDPRRYPLPTKSQLTRELYTQAIGSYKSVEPLLPPPSPFRWLREIEFFLRDSQDEAEQFAGFQQGYQYTLDTTIYRPPVVGTRTSLVDSIAMGLGSDDVVYRIKNISHNGWYPKKLDFYYTPSERVESVGEIRTDANNMIDYIGLGCRAKVTEPCDPCTTNCTIDTVNTTASCDNPNLYSHRLSSINPSAPYPGQNGMLSFCYGWTHFSVDDNNLIAADSITQIPAVKAYRIGGYGKVMKGPGYTGGDLMVFYGAGEINWRLTIPDTTKAYRVRARVATIPTSQPVDTVRYNQFEYRDIEVISPTTTVHEYSIGFDITGDDWGLLDKIEFIPIEGPVEAYQADQALEKARKAVNALFTNDAKNALQLKVTDYSVDQAANLIECVSDAFHSQEKMILLDQIKYAKRLSQARNLLNYGDFESSDWSGENGWRTSPHVHVASNHPIFKGRYLHMPGATSSQFSNHIYPTYVYQKVDESKLKSYTRYLVRGFVGNSKDLELLVERYGKDVHVEMDVPNDIRYALPTNECGSLDRCRPASYQARTPHTCTCKDTTSMHTDCQCQNKVNRTSADMYTNGSPSSVMYADGFHAHKSCGCKNNDMYPNGTDSHKSCRCKDPHVFSYHIDTGCVDQEESLGLWFALKIASENGVANIDNLEIIEAQPLTGEALARVKKREQKWKQEMTKKRLETEKAVQAAQSAIQNLFTNAQHNRLKFETLFPQIVHAEKLVEQIPYVHHPFLSGALPTVPGMNFEIIQQLLAVIGNARALYEQRNLVRNGTFSSGTGSWKVTEGVKVQPLQDTSVLVLSEWIHEASQQLHIDPNRGYVLRVTARKEGGGKGTVTMSDCADYTETLTFTSCDFNTSGSQTMTSGTLSGFVTKTLEIFPDTDRIRIDIGETEGTFQVESVELICMEQMEEDLYDIAGNVVEEMRYLDSSRSMGGTLDAMCYTKIGEFGC

SEQ ID NO: 325 - protein, 1270 aa, Bacillus thuringiensis
MNQNDNKNEYEILDSGNLSYQPRYPLANAPGSKLQNMGYKEWRDMCPDAKRQLLKQIGISPFEPDEWTKVGQSLTISAGLVAAIAGVASVAFPPLAIVAGAFAIISMFFDVLWPESENNTNSQVVWADFAAAAEEMMDEKIADEIKAEAVLQLRIVQSRLRDYQQAACNFQSDPNNESYKALLRDAFDDADDALKEVMILFSREGYEQLLLFDYVQAANLHLLLLKDVVRFGVGWGFPPGRVEQYYSNPTNLGNPGMVQLLAKYTNYSTSLCWKGIEERKWMVESEYRSNNEEYYAYRSNMTMMVLDMVALWPTYDPVKYPYATAVELTREIYSLIAGGFRDYKGYMPIQYTWEKPGSLVTNLERFTIYTWKNFEYFPFAGVETTYQTIGTGSSSTKQAGVIPSPEEGTAWTTPGINVEYHLVESFIYGTLTQLLFYDVYNTPAFKAGSDAVEVPGSIAGTPCKNIPLDANDVNVCVPTLWEESPANPEGVCYPYNREMQSNLLSEVIPEDPKLLTLPHVPPLGYIDAFAFAWRSTTCDTRYNLIPANKIGQIPAVKGNWLGQSGSSVVRTSGNTGGDVVRLYEFGNLGMTVRFSENRSYIIRLRYATVADDLNIIVRVQRRGELEYESELPLNQTSNNSTTQWKFEDYGYQEVGGFYPQVGEEYELWFSPVGTELSSHMDIDKIEFIPMETSLEEYLANQDIEKARKAVNALFTGDVKNALKLNVTDYAIDQAANLVECVSEEFYAQEKMILLDQVKVAKRLSQARNLLNYGDFESPEWSRENGWKTSRHVSVRADNPVFKGRYLHMPGVTSPSFSNNTYPTYVYQKVDESKLKSYTRYLVRGFVGNSKDLELLVERYGKDVHVEMDVPHDIRYSLQTNECGGFDRCRPVSYLARSSHACTCKDTASMHTDCQCQNKANRTVTNMYTNVSPGSAMYTDGFHAQKSCGCKNNDMYQNGTHPHKSCGCKDPHVFSYHIDTGCVDPEENLGLWFALKIAGENGVANIDNLEIIEAQPLTGEALARVKKREQRWKQERDKKRLETEKAVQTAQGAIQNLFTNTQQNLLKFETLFPQIVNAEMLVQQIPYVYHPFLSGALPAVAGMNFKIVQQLSATIGNARSLYNQRNLVQNGTFSSGTGSWHVSEGVEVQPLQNTSVLVLSEWSHEASQQVSVDPDRGYVLRVTARKEGVGKGTVTLSDCADYTETLTFTSCDFNTSGSQTMTSGTLSGFVTKTLEIFPDTDRIRIDIGETEGTFKIESVELICMEQMEDDL

SEQ ID NO: 326 - protein, 1254 aa, Bacillus thuringiensis
MNSNYNNEHEILDMNNRSYQTRYPLANAPGVELQQMSYKDWMDRCEQESLAITFKSVITTALDITSAILGAAKSPKAKVARAAVQVLNTVIKLLWPDPEKPSEPAYDIDFIWKELIGRVEILIEEKIDREAYNAAIGRLSGLKRALSLYQESFETWIDDENDPELQEDVRMRFTSTLFELVTTIETFKYSGQELNLLTVFVQAADFHLMLLQQGVMYGVRWGFDQRTVDSFYQNDRGEGLKNLLPKYSDYCTYWYDQGLNRAKNLKANLSDTVRYPWAANLENMSVLQELEDWNLYNDYRRDMTILVLDLVAVWPTYDLHYYDNGNYGVQSELTRSIYSQAVGNVMGTVFTKEQYEVSFVRPPHLVTWLEKMFIQIRPTEQGAPIDATMAGVSLYYSYSGWDNTVDDILLGYPTYSSSEIRVLSKSKVIVQDQEKNRAIYNTDLQHDKLVDRFVFYQNSGEVNYAGRDNPSSYKTFAWDTDITNYSSQMTWINGPVNEGHFGYIQAYAPEWIPASCEPFNNIVDAEDVITQIPAVKARELRYGARVIKGVGNTGGDLVSIAPHGLCELYVSFPNVVRRYQVRIHYACQDPTKINLNIGDSRHDITLPSTYSGGALTYDSFGYATSEYSYLFYADFYDEKQIVRLGNSFDISQQDVIIDKIEFIPVDIFYAEEQDLEKARKAVNALFTNDAKNALQLDVTDYAVDQAANLVECVSDEFHAQEKMILLDQVKFAKRLSQARNLLNYGDFESSDWSGENGWRTSPHVHVASDNPIFKGRYLHMSGAMSPQFSNNIYPTYAYQKVDESKLKSYTRYLVRGFVGNSKDLELLVERYGKDVYVEMDVPNDIRYTLPRNECGDFDRCKPASYQTKPPHTCTCKDPAVAHTDCQCKDKGNHTSTNMYTNGPTGSEVSTNGFHAHKSCGCGDKHMDKSGTHPHKSCGCKDPHVFTYHIDTGCVDTEENLGLFFALKIASENGVANIDNLEIIEAQPLTGEALARVKKREQRWKQEMTKKRLETETAVQAAQDAIQNLFTNTQYNRLKFETLFPHIVNAELLVQQIPYVYHPFLSGALPVVPGMNFDIFQQLSFLIDTAKRLYEARNLVQNGTFSSGTGSWYVTAGVEVHRLQNTSVLVLSEWSHEASQQVRIDSDRGYVLRVTARKEGAGKGTVTLSDCADYTETLSFTSCDYNTVGTQTMTKGTLSGFVTKTLENFPDTDRIRIDIGETEGTFKVESVELICMEQMEDHLYDMAGNLEQDLT

SEQ ID NO: 327 - protein, 1280 aa, Bacillus thuringiensis
MKQNYNDEYDIIDNGGRGDQSRYPLTNAPSAELQDMNYIEWLDNCTLKEQVELFRDTSTTVRDALATTAGIITALLSVSNPAAAATAGIITILIPQLWPSGSDEVTWEKFMAAAEILIQKQITEAVRNKALTELEGVYRTIRLYQLAAERWNQNKNDPQAQESIRTQFRATNTIIEFAMPSFRVAGFEVPLLNVYAEAANLQLALLRDAVKFGRDWGLPQDEVDDIYSEQLLPRIAEHTDHCVTYFNRGLEEAKKLKANLNDYARYPWAQYINHSKIQGIENWNLFNDYRRNMTILVLDLVALWPTYDPRRYSMVTKSELTRELYTSVRGAFYGHNNDYDQNFEEIERNIISPPHLVTWPINFTVYTQNDYYYPMAGLQHKFNYTESIVSLESPVTGVTGTSNLINFVTADPFILAVTIIGFGQLGTSLGIYAMSFGRKSGSISHVGDIEIGTDDYLDIVDRIPVGDSTPNKLSWMSAAPTTLGSTTFLQYVSYAWRHPSVDSNNRISIDKITQIPAVKAFFIDDNHVKVIKGPGSTGGDLVAFSREGYGLSISVFIPGSDLVSFYRVRIRYASSQSAKVTMGFGGGVEESESKFNFPATYSGGNLTYNSFGYINTLAIASQSTAQTIEVYFRQYEEAEFIVDKLEFIPMEMSLEEYQADQDLEKARKAVNALFTSDAKSELKVNITDYAVDQAANLVECVSEDFHAQEKRILLDQVKFAKRLSQARNLLNYGDFESLDWSGENGWRTSPHVHVASDNPIFKGRYLHMPGAMSPQYSNNTYPTYAYQKVDESKLKSYTRYLVRGFVGNSKDLELLVERYGKEVHVEMDVPNDIRSTLPMNECGGFERCGKVSYQAVSDHTCTCKDTARMNTDCQCKDKINHMTTGVYTSMPVGSAMYPDGYHAHKSCKCGDKTMYGNGKHPHKSCGCKDPHVFSYHIDTGCVDQEENLGLWFALKIASENGVANIDNLEIIEALPLTGEALARVKKREHKWKQEMEQKRCKTEEAVQAAQTAINTLFTNTQYNRLKFETLFPHILHADELVQRIPYVYHPFLLGAYPDVPGMNYDIFQQLSALVNQARGLYDMRNLVRNGTFSAGIGNWQVTDGVATQPEGNTSVLILREWSDKAIQHLRIHAERGYVLRVTARKEGNGDGYVVIHDCDNQQEKLTFTACDYTTMGSSTGTQTMMTSPTNCMPCNSTTWKEEMKALVPMLSGYVTKTAEIFPDTDRIHIEIGETEGTFKIESVELICMEHMEEHAYDMEGDIEANIPPIVRPPIMPPTNV

SEQ ID NO: 328 - protein, 310 aa, Bacillus thuringiensis dakota
MAIIDFNQKIKDFCQWQVSNEFNPGRDLRNWVISYENTNISAVPRGASGGVATVNVTPVLKVASTQELYNGSSVTQSQTARFSETTQETQSSTTTEGARFSSTVTSTTKFTANVNFKAIGSGIDQTIAVAVTGEYNYSSSQTITTQRTRVWDVTQPVIVPPRTRIVATLLIYDAPFSIPIDLNCEVTGKIPINNGFSQDLAGATYDYTIGTNTRASSYTRLGMMAYYNWPGKVPEFVGYQSAGRAAFATLVYRGVGLQTAVQGLYSVVKFEEFPIGRQGETRTYYSPIQLADQNTSLAPDSNTIPIINPM

SEQ ID NO: 329 - protein, 119 aa, Bacillus thuringiensis PS80JJ1
MSAREVHIEINNKTRHTLQLEDKTKLSGGRWRTSPTNVARDTIKTFVAESHGFMTGVEGIIYFSVNGDAEISLHFDNPYIGSNKCDGSSDKPEYEVITQSGSGDKSHVTYTIQTVSLRL

SEQ ID NO: 330 - protein, 119 aa, Bacillus thuringiensis EG5899; identical to SEQ ID NO: 329

SEQ ID NO: 331 - protein, 119 aa, Bacillus thuringiensis PS69Q; identical to SEQ ID NO: 329

SEQ ID NO: 332 - protein, 119 aa, Bacillus thuringiensis PS185GG; identical to SEQ ID NO: 329

SEQ ID NO: 333 - protein, 123 aa, Bacillus thuringiensis PS149B1
MSAREVHIDVNNKTGHTLQLEDKTKLDGGRWRTSPTNVANDQIKTFVAESNGFMTGTEGTIYYSINGEAEISLYFDNPFAGSNKYDGHSNKSQYEIITQGGSGNQSHVTYTIQTTSSRYGHKS

SEQ ID NO: 334 - protein, 123 aa, Bacillus thuringiensis PS167H2
MSAREVHIDVNNKTGHTLQLEDKTKLDGGRWRTSPTNVANDQIKTFVAESHGFMTGTEGTIYYSINGEAEISLYFDNPYSGSNKYDGHSNKNQYEVITQGGSGNQSHVTYTIQTVSSRYGNNS

SEQ ID NO: 335 - protein, 123 aa, Bacillus thuringiensis EG9444
MSAREVHINVNNKTGHTLQLEDKTKLDGGRWRTSPTNVANDQIKTFVAESHGFMTGTEGHIYYSINGEAEISLYFDNPYSGSNKYDGHSNKPQYEVTTQGGSGNQSHVTYTIQTASSRYGNNS

SEQ ID NO: 336 - protein, 123 aa, Bacillus thuringiensis KR1369
MSAREVHIDVNNKTGHTLQLEDKTKLDGGRWRTSPTNVANDQIKTFVAESHGFMTGTEGTIYYSINGEAEISLYFDNPYSGSNKYDGHSNKPQYEVTTQGGSGNQSHVTYTIQTASSRYGNNS

SEQ ID NO: 337 - protein, 132 aa, Bacillus thuringiensis EG4851
MSAREVHIEIINHTGHTLQMDKRTRLAHGEWIITPVNVPNNSSDLFQAGSDGVLTGVEGIIIYTINGEIEITLHFDNPYAGSNKYSGRSSDDDYKVITEARAEHRANNHDHVTYTVQRNISRYTNKLCSNNS

SEQ ID NO: 338 - protein, 132 aa, Bacillus thuringiensis PS201L3
MSAREVHIEIINHTGHTLQMDKRTRLAHGEWIITPVNVPNNSSDLFQAGSDGVLTGVEGIIIYTINGEIEIPLHFDNPYAGSNKYSGRSSDDDYKVITEARAEHRANNHDHVTYTVQRNISRYTNKLCSNNS

SEQ ID NO: 339 - protein, 132 aa, Bacillus thuringiensis PS201HH2; identical to SEQ ID NO: 337

SEQ ID NO: 340 - protein, 385 aa, Bacillus thuringiensis PS80JJ1
MLDTNKVYEISNLANGLYTSTYLSLDDSGVSLMSKKDEDIDDYNLKWFLFPIDNNQYIITSYGANNCKVWNVKNDKINVSTYSSTNSVQKWQIKAKDSSYIIQSDNGKVLTAGVGQSLGIVRLTDEFPENSNQQWNLTPVQTIQLPQKPKIDEKLKDHPEYSETGNINPKTTPQLMGWTLVPCIMVNDSKIDKNTQIKTTPYYIFKKYKYWNLAKGSNVSLLPHQKRSYDYEWGTEKNQKTTIINTVGLQINIDSGMKFEVPEVGGGTEDIKTQLTEELKVEYSTETKIMTKYQEHSEIDNPTNQPMNSIGLLIYTSLELYRYNGTEIKIMDIETSDHDTYTLTSYPNHKEALLLLTNHSYEEVEEITKIPKHTLIKLKKHYFKK

SEQ ID NO: 341 - protein, 385 aa, Bacillus thuringiensis EG5899
MLDTNKVYEISNLANGLYTSTYLSLDDSGVSLMSKKDEDIDDYNLKWFLFPIDNNQYIITSYGANNCKVWNVKNDKINVSTYSSTNSVQKWQIKAKDSSYIIQSDNGKVLTAGVGESLGIVRLTDEFPENSNQQWNLTPVQTIQLPQKPKIDEKLKDHPEYSETGNINPKTTPQLMGWTLVPCIMVNDSGIDKNTQIKTTPYYIFKKYKYWNLAKGSNVSLLPHQKRSYDYEWGTEKNQKTSIINTVGLQINIDSGMKFEVPEVGGGTEDIKTQLTEELKVEYSTETKIMTKYQEHSEIDNPTNQPMNSIGLLIYTSLELYRYNGTEIKIMDIETSDHDTYTLTSYPNHKEALLLLTNHSYEEVEEITKIPKHTLIKLKKHYFKK

SEQ ID NO: 342 - protein, 385 aa, Bacillus thuringiensis PS69Q; identical to SEQ ID NO: 341

SEQ ID NO: 343 - protein, 385 aa, Bacillus thuringiensis PS185GG; identical to SEQ ID NO: 340

SEQ ID NO: 344 - protein, 383 aa, Bacillus thuringiensis PS149B1
MLDTNKVYEISNHANGLYAATYLSLDDSGVSLMNKNDDDIDDYNLKWFLFPIDDDQYIITSYAANNCKVWNVNNDKINVSTYSSTNSIQKWQIKANGSSYVIQSDNGKVLTAGTGQALGLIRLTDESSNNPNQQWNLTSVQTIQLPQKPIIDTKLKDYPKYSPTGNIDNGTSPQLMGWTLVPCIMVNDPNIDKNTQIKTTPYYILKKYQYWQRAVGSNVALRPHEKKSYTYEWGTEIDQKTTIINTLGFQINIDSGMKFDIPEVGGGTDEIKTQLNEELKIEYSHETKIMEKYQEQSEIDNPTDQSMNSIGFLTITSLELYRYNGSEIRIMQIQTSDNDTYNVTSYPNHQQALLLLTNHSYEEVEEITNIPKSTLKKLKKYYF

SEQ ID NO: 345 - protein, 383 aa, Bacillus thuringiensis EG9444
MLDTNKVYEISNHANGLYAATYLSLDDSGVSLMNKNDDDIDDYNLKWFLFPIDDDQYIITSYAANNCKVWNVNNDKINVSTYSSTNSIQKWQIKANGSSYVIQSDNGKVLTAGTGQALGLIRLTDESSNNPNQQWNLTSVQTIQLPQKPIIDTKLKDYPKYSPTGNIDNGTSPQLMGWTLVPCIMVNDPNIDKNTQIKTTPYYILKKYQYWQRAVGSNVALRPHEKKSYTYEWGTEIDQKTTIINTLGFQINIDSGMKFDIPEVGGGTDEIKTQLNEELKIEYSRETKIMEKYQEQSEIDNPTDQPMNSIGFLTITSLELYRYNGSEIRIMQIQTSDNDTYNVTSYPDHQQALLLLTNHSYEEVEEITNIPKSTLKKLKKYYF

SEQ ID NO: 346 - protein, 383 aa, Bacillus thuringiensis PS167H2
MLDTNKIYEISNYANGLHAATYLSLDDSGVSLMNKNDDDIDDYNLRWFLFPIDDNQYIITSYAANNCKVWNVNNDKINVSTYSSTNSIQKWQIKANASSYVIQSNNGKVLTAGTGQSLGLIRLTDESPDNPNQQWNLTPVQTIQLPPKPTIDTKLKDYPKYSQTGNIDKGTPPQLMGWTLIPCIMVNDPNIDKNTQIKTTPYYILKKYQYWQQAVGSNVALRPHEKKSYAYEWGTEIDQKTTIINTLGFQINIDSGMKFDIPEVGGGTDEIKTQLNEELKIEYSRETKIMEKYQEQSEIDNPTDQSMNSIGFLTITSLELYRYNGSEISVMKIQTSDNDTYNVTSYPDHQQALLLLTNHSYEEVEEITNIPKISLKKLKKYYF

SEQ ID NO: 347 - protein, 387 aa, Bacillus thuringiensis EG4851
MIETNKIYEISNKANGLYATTYLSFDNSGVSLLNKNESDINDYNLKWFLFPIDNNQYIITSYGVNKNKVWTANGNKINVTTYSAENSAQQWQIRNSSSGYIIENNNGKILTAGTGQSLGLLYLTDEIPEDSNQQWNLTSIQTISLPSQPIIDTTLVDYPKYSTTGSINYNGTALQLMGWTLIPCIMVYDKTIASTHTQITTTPYYILKKYQRWVLATGSGLSVPAHVKSTFEYEWGTDTDQKTSVINTLGFQINTDTKLKATVPEVGGGTTDIRTQITEELKVEYSSENKEMRKYKQSFDVDNLNYDEALNAVGFIVETSFELYRMNGNVLITSIKTTNKDTYNTVTYPNHKEVLLLLTNHSYEEVTALTGISKERLQNLKNNWKKR

SEQ ID NO: 348 - protein, 387 aa, Bacillus thuringiensis PS201L3; identical to SEQ ID NO: 347

SEQ ID NO: 349 - protein, 387 aa, Bacillus thuringiensis PS201HH2; identical to SEQ ID NO: 347

SEQ ID NO: 350 - protein, 520 aa, Bacillus thuringiensis
MNVNHGMSCGCGCQQGKEEYNDYHVSNEYRDENPSTTCNSQQGNYEYEQSKETYNNDYQSYEYNQQNYNTCGRNQGTMEQESMQKDRNWENANYSGYDGCSPNQLNALNLPDESTRFQKITNVNTRDSHRVLDMMDVPSGTRLDTRVPPICSQTEFTNTVSNELVSTNHDTQFLIFYQTDDSSFIIGNRGNGRVLDVFPSNRNGYTIVSNVYSGSRNNQRFRMNKASNNQFSLQTIFKDRVNICGHIHNFNAIITATTLGENDSNALFQVQSSTNITLPTLPPRTTLEPPRALTNINDTGDSPAQAPRAVEGSVLIPAIAVNDVIPVAQRMQESPYYVLTYNTYWHRVISAILPGSGQTTRFDVNLPGPNQSTMVDVLDTAITADFRLQFVGSGRTNVFQQQIRNGLNILNSTTSHRLGDETRNWDFTNRGAQGRLAFFVKAHEFVLTRANGTRVSDPWVALDPNVTAAQTFGGVLLTLEKEKIVCASNSYNLSVWKTPMEIKNGKIYTKNEWNTKPNYK

SEQ ID NO: 351 - protein, 126 aa, Bacillus thuringiensis
MTVYNATFTINFYNEGEWGGPEPYGYIKAYLTNPDHDFEIWKQDDWGKSTPERSTYTQTIKISSDTGSPINQMCFYGDVKEYDVGNADDILAYPSQKVCSTPGVTVRLDGDEKGSYVTIKYSLTPA

SEQ ID NO: 352 - protein, 310 aa, Bacillus thuringiensis
MSILNLQDLSQKYMTAALNKINPKKVGTFHFEEPIVLSESSTPTRSEIDAPLNVMFHASQDLDNRRGTSDLKQTVSFSQTQINTVETKTTDGVKTTKEHTFSGTLELKIKYAMFDLGGVSGTYQYKKSTENDISSEKSKSKSDSQTWSISSEYTVKPGVKETLDFYIVGIKTEVPLNIFAEFQGTKTIDNVSNVMAYQEFISQDDEHIRACMKASKLANPDHLSGYTAPKELKANTSKGSVEFRGTAIAKINTGVKCLVVVNGKNSITGKTYSYIHPKTMLADGTIEYLESEIDLLESEIDLLTTSSILV

SEQ ID NO: 353 - protein, 660 aa, Bacillus thuringiensis aizawai
MNSYENKNEYEILNDSKKSNMSNPYLRYPLANDSLASMQNTNYKDWLTMCDRTDTDVLSSRGAVSTGVGMLSTILSLFGIPLIGEGIDLLLGAADFLWPESDGGHQYTWEDLMNHIEELMDERLETEKRTTALDDLRGLKALLGLFRDAFDSWEKNQNDPIAKNRVGGYFEDVHTHFVKDMASIFSATNYEVLLLPVYAQAANLHLLLLREGVIYGSRWGIAPAADFYHDQLLKYTAIYANHCVTWYNNGLAQQKELFAKSPNWNRFNAYRRDMTITVLDIIALFPTYDARLYTKPIKTELTREIYSDVLNLDVYGVQQTDLNKNEAAFTRSPHLVTRLRGFDFYTRTKYAYWRYLAGHTNYFSFTGNGTIYSSSFNNWYDTDMTKSTINIPDYANIYKLWTKSYTNISPYTDPVGISQMQFSLTNNQQLTYTGTSAPKYPVRETFFEIPPTDEKPLTYENYSHILSYMTSAQHFGDKKIGYTFAWMHESVDFDNRVDPDKITQIPAVKGDYLQYGYVKQGPGHTGGDLVSMIRTDRLGINVYFPQPLDYRIRIRYSTSSNGYLYIYSPNTKIVYLPPTTLVDGQPTFDPMDFSAFRVVEVPASFRASVAGYTNFTIEAGFGPVYIDKIEFIPDNTTTLEYEGGRDLEKTKNAVNDLFTN

SEQ ID NO: 354 - protein, 652 aa, Bacillus thuringiensis san diego
MIRKGGRKMNPNNRSEHDTIKTTENNEVPTNHVQYPLAETPNPTLEDLNYKEFLRMTADNNTEALDSSTTKDVIQKGISVVGDLLGVVGFPFGGALVSFYTNFLNTIWPSEDPWKAFMEQVEALMDQKIADYAKNKALAELQGLQNNVEDYVSALSSWQKNPVSSRNPHSQGRIRELFSQAESHFRNSMPSFAISGYEVLFLTTYAQAANTHLFLLKDAQIYGEEWGYEKEDIAEFYKRQLKLTQEYTDHCVKWYNVGLDKLRGSSYESWVNFNRYRREMTLTVLDLIALFPLYDVRLYPKEVKTELTRDVLTDPIVGVNNLRGYGTTFSNIENYIRKPHLFDYLHRIQFHTRFQPGYYGNDSFNYWSGNYVSTRPSIGSNDIITSPFYGNKSSEPVQNLEFNGEKVYRAVANTNLAVWPSAVYSGVTKVEFSQYNDQTDEASTQTYDSKRNVGAVSWDSIDQLPPETTDEPLEKGYSHQLNYVMCFLMQGSRGTIPVLTWTHKSVDFFNMIDSKKITQLPLVKAYKLQSGASVVAGPRFTGGDIIQCTENGSAATIYVTPDVSYSQKYRARIHYASTSQITFTLSLDGAPFNQYYFDKTINKGDTLTYNSFNLASFSTPFELSGNNLQIGVTGLSAGDKVYIDKIEFIPVN

SEQ ID NO: 355 - protein, 652 aa, Bacillus thuringiensis 886
MIRKGGRKMNPNNRSEHDTIKTTENNEVPTNHVQYPLAETPNPTLEDLNYKEFLRMTADNNTEALDSSTTKDVIQKGISVVGDLLGVVGFPFGGALVSFYTNFLNTIWPSEDPWKAFMEQVEALMDQKIADYAKNKALAELQGLQNNVEDYVSALSSWQKNPVSSRNPHSQGRIRELFSQAESHFRNSMPSFAISGYEVLFLTTYAQAANIHLFLLKDAQIYGEEWGYEKEDIAEFYKRQLKLTQEYTDHCVKWYNVGLDKLRGSSYESWVNFNRYRREMTLTVLDLIALFPLYDVRLYPKEVKTELTRDVLTDPIVGVNNLRGYGTTFSNIENYIRKPHLFDYLHRIQFHTRFRPGYYGNDSFNYWSGNYVSTRPSIGSNDIITSPFYGNKSSEPVQNLEFNGEKVYRAVANTNLAVWPSAVYSGVTKVEFSQYNDQTDEASTQTYDSKRNVGAVSWDSIDQLPPETTDEPPEKGYSHQLNYVMCFLMQGSRGTIPVLTWTHKSVDFFNMIDSKKITQLPLVKAYKLQSGASVVAGPRFTGGDIIQCTENGSAATIYVTPDVSYSQKHRARIHYASTSQITFTLSLDGAPFNQYYFDKTINKGDTLTYNSFNLASFSTPFELSGNNLQIGVTGLSAGDKVYIDKIEFIPVN

SEQ ID NO: 356 - protein, 644 aa, Bacillus thuringiensis tenebrionis Mm2
MNPNNRSEHDTIKTTENNEVPTNHVQYPLAETPNPTLEDLNYKEFLRMTADNNTEALDSSTTKDVIQKGISVVGDLLGVVGFPFGGALVSFYTNFLNTSWPSEDPWKAFMEQVEALMDQKIADYAKNKALAELQGLQNNVEDYVSALSSWQKNPVSSRNPHSQGRIRELFSQAESYFRNSMPSFAISGYEVLFLTTYAQAANTHLFLLKDAQIYGEEWGYEKEDIAEFYKRQLKLTQEYTDHCVKWYNVGLDKLRGSSYESWVNFNRYRREMTLTVLDLIALFPLYDVRLYPKEVKTELTRDVLTDPIVGVNNLRGYGTTFSNIENYIRKPHLFNYLRRIQFHTRFQPGYYGNDSFNYWSGNYVSTRPSIGSNDIITSPFYGNKSSEPVQNLEFNGEKVYRAVANTNLAVWPSAVYSGVTKVEFSQYNDQTDEASTQTYDSKRNVGAVSWDSIDQLPPETTDEPLEKGYSHQLNYVMCFLMQGSRGTIPVLTWTHKSVDFFNMIDSKKITQLPLVKAYKLQSGASVVAGPRFTGGDIIQCTENGSAATIYVTPDVSYSQKYRARIHYASTSQITFTLSLDGAPFNQYYFDKTINKGDTLTYNSFNLASFSTPFELSGNNLQIGVTGLSAGDKVYIDKIEFIPVN

SEQ ID NO: 357 - protein, 644 aa, Bacillus thuringiensis tenebrionis
MNPNNRSEHDTIKTTENNEVPTNHVQYPLAETPNPTLEDLNYKEFLRMTADNNTEALDSSTTKDVIQKGISVVGDLLGVVGFPFGGALVSFYTNFLNTIWPSEDPWKAFMEQVEALMDQKIADYAKNKALAELQGLQNNVEDYVSALSSWQKNPVSSRNPHSQGRIRELFSQAESHFRNSMPSFAISGYEVLFLTTYAQAANTHLFLLKDAQIYGEEWGYEKEDIAEFYKRQLKLTQEYTDHCVKWYNVGLDKLRGSSYESWVNFNRYRREMTLTVLDLIALFPLYDVRLYPKEVKTELTRDVLTDPIVGVNNLRGYGTTFSNIENYIRKPHLFDYLHRIQFHTRFQPGYYGNDSFNYWSGNYVSTRPSIGSNDIITSPFYGNKSSEPVQNLEFNGEKVYRAVANTNLAVWPSAVYSGVTKVEFSQYNDQTDEASTQTYDSKRNVGAVSWDSIDQLPPETTDEPLEKGYSHQLNYVMCFLMQGSRGTIPVLTWTHKSVDFFNMIDSKKITQLPLVKAYKLQSGASVVAGPRFTGGDIIQCTENGSAATIYVTPDVSYSQKYRARIHYASTSQITFTLSLDGAPFNQYYFDKTINKGDTLTYNSFNLASFSTPFELSGNNLQIGVTGLSAGDKVYIDKIEFIPVN

SEQ ID NO: 358 - protein, 644 aa, Bacillus thuringiensis tenebrionis; identical to SEQ ID NO: 357

SEQ ID NO: 359 - protein, 644 aa, Bacillus thuringiensis; identical to SEQ ID NO: 357

SEQ ID NO: 360 - protein, 644 aa, Bacillus thuringiensis tenebrionis
MNPNNRSEHDTIKTTENNEVPTNHVQYPLAETPNPTLEDLNYKEFLRMTADNNTEALDSSTTKDVIQKGISVVGDLLGVVGFPFGGALVSFYTNFLNTIWPSEDPWKAFMEQVEALMDQKIADYAKNKALAELQGLQNNVEDYVSALSSWQKNPVSSRNPHSQGRIRELFSQAESHFRNSMPSFAISGYEVLFLTTYAQAANTHLFLLKDAQIYGEEWGYEKEDIAEFYKRQLKLTQEYTDHCVKWYNVGLDKLRGSSYESWVNFNRYRREMTLTVLDLIALFPLYDVRLYPKEVKTELTRDVLTDPIVGVNNLRGYGTTFSNIENYIRKPHLFDYLHRIQFHTRFQPGYYGNDSFNYWSGNYVSTRPSIGSNDIITSPFYGNKSSEPVQNLEFNGEKVYRAVANTNLAVWPSAVYSGVTKVEFSQYNDQTDEASTQTYDSKRNVGAVSWDSIDQLPPETTDEPLEKGYSHQLNYVMCFLMQGSRGTIPVLTWTHKSVDFFNMIDSKKITQLPLVKAYKLQSGASVVAGPRFTGGDIIQCTENASAATIYVTPDVSYSQKYRARIHYASTSQITFTLSLDGAPFNQYYFDKTINKGDTLTYNSFNLASFSTPFELSGNNLQIGVTGLSAGDKVYIDKIEFIPVN

SEQ ID NO: 361 - protein, 644 aa, Bacillus thuringiensis morrisoni EG2158; identical to SEQ ID NO: 357

SEQ ID NO: 362 - protein, 644 aa, Bacillus thuringiensis tenebrionis; identical to SEQ ID NO: 357

SEQ ID NO: 363 - protein, 652 aa, Bacillus thuringiensis 22; identical to SEQ ID NO: 354

SEQ ID NO: 364 - protein, 652 aa, Bacillus thuringiensis YM-03
MIRKGGRKMNPNNRSEHDTIKTTENNEVPTNHVQYPLAETPNPTLEDLNYKEFLRMTADNNTEALDSSTTKDVIQKGISVVGDLLGVVGFPFGGALVSFYTNFLNTIWPSEDPWKAFMEQVEALMDQKIADYAKNKALAELQGLQNNVEDYVSALSSWQKNPVSSRNPHSQGRIRELFSQAESHFRNSMPSFAISGYEVLFLTTYAQAANTHLFLLKDAQIYGEEWGYEKEDIAEFYKRQLKLTQEYTDHCVKWYNVGLDKLRGSSYESWVNFNRYRREMTLTVLDLIALFPLYDVRLYPKEVKTELTRDVLTDPIVGVNNLRGYGTTFSNIENYIRKPHLFDYLHRIQFHTQFQPGYYGNDSFNYWSGNYVSTRPSIGSNDIITSPFYGNKSSEPVQNLEFNGEKVYRAVANTNLAVWPSAVYSGVTKVEFSQYNDQTDEASTQTYDSKRNVGAVSWDSIDQLPPETTDEPLEKGYSHQLNYVMCFLMQGSRGTIPVLTWTHKSVDFFNMIDSKKITQLPLVKAYKLQSGASVVAGPRFTGGDIIQCTENGSAATIYVTPDVSYSQKYRARIHYASTSQITFTLSLDGAPFNQYYFDKTINKGDTLTYNSFNLASFSTPFELSGNNLQIGVTGLSAGDKVYIDKIEFIPVN

SEQ ID NO: 365 - protein, 644 aa, Bacillus thuringiensis UTD-001
MNPNNRSEHDTIKTTENNEVPTNHVQYPLAETPNPTLEDLNYKEFLRMTADNNTEALDSSTTKDVIQKGISVVGDLLGVVGFPFGGALVSFYTNFLNTIWPSEDPWKAFMEQVEALMDQKIADYAKNKALAELQGLQNNVEDYVSALSSWQKNPVSSRNPHSQGRIRELFSQAESHFRNSMPSFAISGYEVLFLTTYAQAANTHLFLLKDAQIYGEEWGYKKEDIAEFLKRQLKLTQEYTDHFVQWYYVGLDKIRGSFYESWVNFNRYRREMTLTVLDLIALFPLYDVRLYPKEVKTELTRDVLTDPIVGVNNLRGYGTTFSNIENYIRKPHLFDYLHRIQFHTRFQPGYYGNDSFNYWSGNYVSTRPSIGSNDIITSPFYGNKSSEPVQNLGFNGEKVYRAVANTNLAVWPSAVNSGVTKVKFSQYNDQTDEASTQTSDSKRNVGAVSWDSIDQLPPEATDEPLEKGYSHQLNYVMCFLMQGSRGTIPVLTWTHKSVDFFNMIDSKKITQLPLVKAYKLQSGASVVAGPRFTGGDIIQCTENGSAATIYVTPDVSYSQKYRARIHYASTSQITFTLSLDGAPFNQYYFDKTINKGDTLTYNSFNLASFSTPFELSGNNLQIGVTGLSAGDKVYIDKIEFIPVN

SEQ ID NO: 366 - protein, 659 aa, Bacillus thuringiensis tolworthi 43F
MIRMGGRKMNPNNRSEYDTIKVTPNSELPTNHNQYPLADNPNSTLEELNYKEFLRMTADNSTEVLDSSTVKDAVGTGISVVGQILGVVGVPFAGALTSFYQSFLNAIWPSDADPWKAFMAQVEVLIDKKIEEYAKSKALAELQGLQNNFEDYVNALDSWKKAPVNLRSRRSQDRIRELFSQAESHFRNSMPSFAVSKFEVLFLPTYAQAANTHLLLLKDAQVFGEEWGYSSEDIAEFYQRQLKLTQQYTDHCVNWYNVGLNSLRGSTYDAWVKFNRFRREMTLTVLDLIVLFPFYDVRLYSKGVKTELTRDIFTDPIFTLNALQEYGPTFSSIENSIRKPHLFDYLRGIEFHTRLRPGYSGKDSFNYWSGNYVETRPSIGSNDTITSPFYGDKSIEPIQKLSFDGQKVYRTIANTDIAAFPDGKIYFGVTKVDFSQYDDQKNETSTQTYDSKRYNGYLGAQDSIDQLPPETTDEPLEKAYSHQLNYAECFLMQDRRGTIPFFTWTHRSVDFFNTIDAEKITQLPVVKAYALSSGASIIEGPGFTGGNLLFLKESSNSIAKFKVTLNSAALLQRYRVRIRYASTTNLRLFVQNSNNDFLVIYINKTMNIDGDLTYQTFDFATSNSNMGFSGDTNDFIIGAESFVSNEKIYIDKIEFIPVQ

SEQ ID NO: 367 - protein, 651 aa, Bacillus thuringiensis PGSI208
MNPNNRSEYDTIKVTPNSELPTNHNQYPLADNPNSTLEELNYKEFLRMTADNSTEVLDSSTVKDAVGTGISVVGQILGVVGVPFAGALTSFYQSFLNAIWPSDADPWKAFMAQVEVLIDKKIEEYAKSKALAELQGLQNNFEDYVNALDSWKKAPVNLRSRRSQDRIRELFSQAESHFRNSMPSFAVSKFEVLFLPTYAQAANTHLLLLKDAQVFGEEWGYSSEDIAEFYQRQLKLTQQYTDHCVNWYNVGLNSLRGSTYDAWVKFNRFRREMTLTVLDLIVLFPFYDVRLYSKGVKTELTRDIFTDPIFTLNALQEYGPTFSSIENSIRKPHLFDYLRGIEFHTRLRPGYSGKDSFNYWSGNYVETRPSIGSNDTITSPFYGDKSIEPIQKLSFDGQKVYRTIANTDIAAFPDGKIYFGVTKVDFSQYDDQKNETSTQTYDSKRYNGYLGAQDSIDQLPPETTDEPLEKAYSHQLNYAECFLMQDRRGTIPFFTWTHRSVDFFNTIDAEKITQLPVVKAYALSSGASIIEGPGFTGGNLLFLKESSNSIAKFKVTLNSAALLQRYRVRIRYASTTNLRLFVQNSNNDFLVIYINKTMNIDGDLTYQTFDFATSNSNMGFSGDTNDFIIGAESFVSNEKIYIDKIEFIPVQ

SEQ ID NO: 368 - protein, 652 aa, Bacillus thuringiensis EG4961
MNPNNRSEHDTIKVTPNSELQTNHNQYPLADNPNSTLEELNYKEFLRMTEDSSTEVLDNSTVKDAVGTGISVVGQILGVVGVPFAGALTSFYQSFLNTIWPSDADPWKAFMAQVEVLIDKKIEEYAKSKALAELQGLQNNFEDYVNALNSWKKTPLSLRSKRSQDRIRELFSQAESHFRNSMPSFAVSKFEVLFLPTYAQAANTHLLLLKDAQVFGEEWGYSSEDVAEFYHRQLKLTQQYTDHCVNWYNVGLNGLRGSTYDAWVKFNRFRREMTLTVLDLIVLFPFYDIRLYSKGVKTELTRDIFTDPIFSLNTLQEYGPTFLSIENSIRKPHLFDYLQGIEFHTRLQPGYFGKDSFNYWSGNYVETRPSIGSSKTITSPFYGDKSTEPVQKLSFDGQKVYRTIANTDVAAWPNGKVYLGVTKVDFSQYDDQKNETSTQTYDSKRNNGHVSAQDSIDQLPPETTDEPLEKAYSHQLNYAECFLMQDRRGTIPFFTWTHRSVDFFNTIDAEKITQLPVVKAYALSSGASIIEGPGFTGGNLLFLKESSNSIAKFKVTLNSAALLQRYRVRIRYASTTNLRLFVQNSNNDFLVIYINKTMNKDDDLTYQTFDLATTNSNMGFSGDKNELIIGAESFVSNEKIYIDKIEFIPVQL

SEQ ID NO: 369 - protein, 652 aa, Bacillus thuringiensis EG5144
MNPNNRSEHDTIKVTPNSELPTNHNQYPLADNPNSTLEELNYKEFLRMTEDSSTEVLDNSTVKDAVGTGISVVGQILGVVGVPFAGALTSFYQSFLDTIWPSDADPWKAFMAQVEVLIDKKIEEYAKSKALAELQGLQNNFEDYVNALNSWKKTPLSLRSKRSQDRIRELFSQAESHFRNSMPSFAVSKFEVLFLPTYAQAANTHLLLLKDAQVFGEEWGYSSEDVAEFYHRQLKLTQQYTDHCVNWYNVGLNGLRGSTYDAWVKFNRFRREMTLTVLDLIVLFPFYDVRLYSKGVKTELTRDIFTDPIFSLNTLQEYGPTFLSIENSIRKPHLFDYLQGIEFHTRLQPGYSGKDSFNYWSGNYVETRPSIGSSKTITSPFYGDKSTEPVQKLSFDGQKVYRTIANTDVAAWPNGKIYFGVTKVDFSQYDDQKNETSTQTYDSKRNNGHVGAQDSIDQLPPETTDEPLEKAYSHQLNYAECFLMQDRRGTIPFFTWTHRSVDFFNTIDAEKITQLPVVKAYALSSGASIIEGPGFTGGNLLFLKESSNSIAKFKVTLNSAALLQRYRVRIRYASTTNLRLFVQNSNNDFIVIYINKTMNIDDDLTYQTFDLATTNSNMGFSGDTNELIIGAESFVSNEKIYIDKIEFIPVQL

SEQ ID NO: 370 - protein, 649 aa, Bacillus thuringiensis kurstaki BtI109P
MNPNNRSEHDTIKATENNEVSNNHAQYPLADTPTLEELNYKEFLRRTTDNNVEALDSSTTKDAIQKGISIIGDLLGVVGFPYGGALVSFYTNLLNTIWPGEDPLKAFMQQVEALIDQKIADYAKDKATAELQGLKNVFKDYVSALDSWDKTPLTLRDGRSQGRIRELFSQAESHFRRSMPSFAVSGYEVLFLPTYAQAANTHLLLLKDAQIYGTDWGYSTDDLNEFHTKQKDLTIEYTNHCAKWYKAGLDKLRGSTYEEWVKFNRYRREMTLTVLDLITLFPLYDVRTYTKGVKTELTRDVLTDPIVAVNNMNGYGTTFSNIENYIRKPHLFDYLHAIQFHSRLQPGYFGTDSFNYWSGNYVSTRSSIGSDEIIRSPFYGNKSTLDVQNLEFNGEKVFRAVANGNLAVWPVGTGGTKIHSGVTKVQFSQYNDRKDEVRTQTYDSKRNVGGIVFDSIDQLPPITTDESLEKAYSHQLNYVRCFLLQGGRGIIPVFTWTHKSVDFYNTLDSEKITQIPFVKAFILVNSTSVVAGPGFTGGDIIKCTNGSGLTLYVTPAPDLTYSKTYKIRIRYASTSQVRFGIDLGSYTHSISYFDKTMDKGNTLTYNSFNLSSVSRPIEISGGNKIGVSVGGIGSGDEVYIDKIEFIPMD

SEQ ID NO: 371 - protein, 666 aa, Bacillus thuringiensis aizawai
NSYENKNEYEILESSSNNTNMPNRYPFANDRDMSTMSFNDCQGISWDEIWESAETITSIGIDLIEFLMEPSLGGINTLFSIIGKLIPTNHQSVSALSICDLLSIIRKEVADSVLSDAICRFLDGKLKNYREYYLPYLEAWLKDGKPLQKTNNSDIGQLVKYFELSERDFNEILGGSLARNNAQILLLPYFCASCKCQLLLLRDAVQYEEQWFPFLSAENVRSELISPNSGCDFTGDYYERLKCKIAEYTDYCEYWYQAGLNQIKQAGTGADTWAKFNKFRREMTLTVLDIIAIFQTYDFKKYPLPTHVELTREIYTDPVGYSSGTYSWLKYWTGAFNTLEANGTRGPGLVTWLRSIGIYNEYVSRYFSGWVGTRHYEDYTTGNGNFQRMSGTTSNDLRDISFPNSDIFKIESKAIMNLVGEINARPEYRVSRAEFSESTAFIYLYDAGNSGLSSMTITSKLPGIKNPEPSYRDYSHRLSNAACVGAGNSRINVYGWTHTSMSKYNLIYPDKITQIPAVKAFDISDTGPGQVIAGPGHTGGNVVSLPYYSRLKIRLIPASTNKNYLVRVRYTSTSNGRLLVERWSPSSIINSYFFLPSTGPGDSFGYVDTLVTTFNQPGVEIIIQNLDTPINVDKVEFIPVNSTALEYEGKQSLEKAQDVVNDLFVK

SEQ ID NO: 372 - protein, 666 aa, Bacillus thuringiensis serovar aizawai
MNSYQNKNEYEILKSSPNNTNIPNRYPFANDRDMSPMSWNDCQGSPWNDVWESTASFTGIGIDLITFLGEPSITGINLLFSVIGKLLPSGQNVASLSICDLLSIIRKEVDESVLSDAYGDFNGVVNNYQTYYLTSLKKWLDAGKPTTGQLLTDVTKHFEFSEREFNALLKGSLSRPKGEILLLPTYTQGANLHLLLLRDFVQYKAVWEKELRTENVESELISPSFDYEGHFKEQLAEHINHCITWYQAGLNQIKESGTSTENWLKFNKFRREMTLSVLDIIAIFPTYDFENYKSETHIELSREVYTDPVGYNGWEQNLTNGFNTLEANGTRGPGLVTWLKKIDIFTDEVTEYSGWSPVAILRGWAGTRHYEIYTGSSNTLQRISGTTSNDVSNIDFINSRIFIITSLARYALAGAAAGNPGSPRYRVSRVEFRSTGRYTFLYEVNSPGISSMTIESKLPGVKNATGFTDYFNRLSNAACVQFGTSRVNVYGWTHISMGEGNYVYPNKITQIPAVKAWEIRGTSSVVAGPGHTGGNLVKMSYHSVWSIKFTCQQLKRYRVRIRYASDGNCQLAMRRWRGGPGYVQEARHTVQRTFSGSMTYDSFKYLDIFTMPAEDYTFDLTIDLESGGALYIDKIEFIPDDLTTLEYEEERNLEKTKNAVNDLFTN

SEQ ID NO: 373 - protein, 657 aa, Bacillus thuringiensis Y41
MNSYENKNEYEILESSSNNTNMPNRYPFANDRDISPMSWNDCQGSSWEDVWESTSSLASIGIDLIDHMFIAGPSITSINLLFSIIGKLIPSSGQSISSLSICDLLSIIRKEVDESVLSGAYGDFNGVLANYRDYYLKSLKTWLDEGQPTTGQSLKDVTKHFEASEREFNALLQGSLSRPKGEILLLPTYAQGANFHLLLLRDFVQYKDAWANELRTENVESELISPTFDYEGRFKEQLAKHINHCIYWYQAGLDQIKQGGTGADIWTKFNKFRREMTLSVLDIIAIFPTYDFEKYPLPTHVELTREIYTDAVGYSSGTYSWLRNWPNTFNALEANGTRGPGLVTWLSKIGIYNEYVSRYFAGWVGTRHYEDYTKGNGIFQRMSGTTSNDLRNIDFQNADVYKITSLAIMNLVGETTARPEYRVSKADFRRVGGPDLNYDAGNNGLSRMTIESTFPLVLDSNGVRGPSHRLSNAACVVYGNSRVNVFGWTHTSMTKNNPIYTDKISQIPAVKAFEISNYATVYAGPGHTGGGVVGLTISYQLKIRLAPASTNKNYRVRVRYASTSNGRIRVERWSPSSVINNDFPYSSTGSRDIFGYVDTLVTTFYQSGVEIIIQNIAFGEIIIDKVELIPLDSTTLEYDGEQNLKKAQNVVNDLFTN

SEQ ID NO: 374 - protein, 658 aa, Bacillus thuringiensis S2096-2
MNSYQNTNGYEILESSSNNTNTPNRYPFANDPNIFPIILNDCPGKPWQDTWKSISNFISVMVSMAGFISSPGVLIGIPALLGIVNLLIPSSGPSVAALSICDLLSIIRKEVDESVLNDAVADFNGKLTNYKEYYLSSLQEWLSAGKPNDSRLSNVVEYFKKSEEGFNEILAGSLSRQNAQILLLPTFAQAANVQLLLLRDAVQYKKEWGALLSAEKVGSELISPTIDYGQRLKDKIAQYAKYCVFWYQEGLNQIKEEGAGTTTWLKFNKFRREMTLAVLDIIALFPIYDFEKYPLGTNVELTREIYTDPVGYSRGNYRWEGLFSFNSLEANGTRGPGLVTWLQAIDIYSHPVFTQPGYLIGWGGTRHYEDYTKGNGAFQRMSGTTSNDPHSISFGNTDIFKISSLARVELQPFVGYSIPRYRTSRAEFFPTTLNTLLYERNSSGYSQTIESVLPGIDKDLPPSARNYSHRLSNAACVQYETSVVNVFGWTHTSMTRNNPIYPDKITQIPAVKAFALENGAYVSAGPGDTGGDVVTLPYLGRLKIRLTPAPTNKNYRVRIRYATSYGASLMVQRWSPSGSESDYFGSSPTGPYPTFGYMNTLVTTFNQSGVEIIIENRHYSNIIIDKIEFLPDDLTTLESEGERNLEKTKKAVNDLFIN

SEQ ID NO: 375 - protein, 825 aa, Bacillus thuringiensis A1462
MNQNCNNNGYEVLNSGKGYCQPRYPFAQAPGSELQNMGYKEWMNMCTSGDPTVLGEGYSADVRDAVITSINIASYLLSVPFPPAGVAAGILGALLGLLWPTNTQAVWEAFMNTVEALINQKLDEYARSKAISELNGLKNVLELYQDAADDWNENPGDLRNKNRVLTEFRNVNGHFENSMPSFAVRNFEVNLLPVYAEAANLHLLLLRDAVKFGEGWGMSTDPGAERDDMYRRLRSRTEIYTDHCVNTYNQGLQQAKSLQANVSDYSRYPWTQYNQSGGFSYREAKGEYRGTENWNLYNAFRRDMTILVLDIIAQFPTYDPGLYSRPVKSELTREVYTDIRGTTWRSDANLNTIDAIENRMVGSRQLQLFTWLTEMKFYIRNTGSITSYTHGDLMVGLEKKIRKTNDNDQWLPLEGQNTSYTRIDRPGIELGKNYWYYARTQQWFETRLLQLWANTDVLSLNAGTVGNEFWVRDVPDYRNIYARSTRNHFIENHRLSWIKFEPVRDNCPFAWPGYKQLSALLFGWTHNSVDLNNIISQYRITQIPAVKAYWNRGAFSVIRGPGSTGGNLVQLGTGGEVSVKVRPEQTGSDWYRVRIRYAAGSRGRLNVKKYVSSIHASVTYDYNMTMSSSTQGTYNSFQYLDVYNFRLAEPEFEVWLTNESGGPIWIDKIEFIPLSPIPELPVYPGTYQIVTALNNSSVVTSEEFCMGIGLTTRCGVNLWSNNGNTLQKWRFVYNGDQNAFQIKSTPNEDLVLSGSNSGTSVTAETNQNRPNQYWLIEEAGNGYVYLRSKGNPNLVLDVAGTSTANGTNIILWNYNGSTNQKFKLS

SEQ ID NO: 376 - protein, 829 aa, Bacillus thuringiensis A1462
MNQSCNNNGYEVLNSGKGYCQPRYPFAQAPGSELQNMGYKEWMNMCTSGDPTVLGGGYSADVKDAVITSINIASYLLSVPFPPAGVAAGILGALLGLLWPTNTQAVWEAFMNTVEALINQKLDEYARSKAISELNGLKNVLELYQDAADDWNENPGDLRNKNRVLTEFRNVNGHFENSMPSFAVRNFEVNLLPVYAEAANLHLLLLRDAVKFGEGWGMSTDPGAERDDMYRRLRSRTEIYTDHCVNTYNQGLQQAKSLQANVSDYSRYPWTQYNQSGGFSYREAKGEYRGTENWNLYNAFRRDMTILVLDIIAQFPTYDPGLYSRPVKSELTREVYTDIRGTTWRSDANLNTIDAIENRMVGSRQLQLFTWLTEMKFYIRNTGSITSYTHGDLMVGLEKKIRKTNDNDQWLPLEGQNTSYTRIDRPGIELGKNYWYYARTQQWFETRLLQLWVNTDVLSLNAGTVGNEFWARDVPDYRNIYARSTRNHFIENHRLSWIKFEPVRDNCPFAWPGYKQLSALLFGWTHNSVDPFNTIASDRITQIPAVKGYLVDNGATVVRGPGNTGGDLVRLPAYNQQWTQLRVKVRPSTTARTRGYNVRIRYASEGNANLFVGKYVDTANRFYETGNYAVNQTFSGSMTYNSFKYLDAIGFAANEEEFRIELRCNSGGPIYIDKIEFIPVNPIPEPPEGIYQIVTALNNSSVVTSEEFCMGIGLTTRCGVNLWSNNGNTLQKWRFVYNGDQNAFQIKSTPNEDLVLSGSNSGTSVTAETNQNRPNQHWLIEEAGNGYVYLRSKGNPNLVLDVAGTSTANGTNIILWNYNGSTNQKFKLS

SEQ ID NO: 377 - protein, 864 aa, Bacillus thuringiensis serovar andalousiensis BGSC 4AW1
MPLFVVYKSEHTCYSTCEVKKGGLYMNPYFKNNAYEILDDGNMNYHPKYPLTQPLGSELQNIHYKDWLATFPERNDSILGENSSLRDGIITSTNIIAYLLSVPFPAAGAAAGILGALLGFLWPTNTQAVWEAFMEAVEALIDQKISDFAREQAIARLEGINKAIELYQNALSNLEKNPNNAVLREHVREQFIATNTYIVGSMPLFRVKGYEVPMLTMFTEAANLHLLILRDAAKFGASWDMDVSTIESYQQYLEKETVNYTDYCVGTYNVGLEEAKTLFADLCDLNTYPWTRYNQGWREEEKPNCSLQQINRYEQQLNEQINSYRAAFRYSPGEYQKLENWNLYNAFRRNMTIMVLDLVSLWPTYNPKQYVLPVKAELTREIYTDIRGTTYQSDESQNTLPVIEGRMIPPPRLFQWLRSFTFHLQNVHSDWTAGQIATGLQQTVQTTLGPSQVLPLTGVQGTSTTSFIPYIDGITRIDTQQWFEPRRFKFWSGGYIEKNFGSIEEKSPFWAEGPKWRVYEPSARANEILEHRLSWMTYEPVRSNAPFVYPQYKQLGALALGWTHQSVDPENRVVSDKITQIPAVKAYWNRGAFSVVKGSGSTGGDLVQLSPSGEVSIMVKPSRSGIGQFRVRIRYAATANGRLNIKKYVGSIHASQSYDYKQTTTSNLTFSAFQYLDVYNFNLAETQFEVWLTNESGGPIFIDKIEFIPTTPTPEPEPQNPPVPEGRYQMVTALNNSSIVDLNLSQRYVQIYGNGNAENQKWRFVYDASKDAYQIINVAAGQELVLSWFQYPEEPDAVIGEPNNKLNRQYWIFEDAGNGYTYVRNMADLNRVLDVPNGNTGNGTPIYASYFSGGTNQKFKLNKL

SEQ ID NO: 378 - protein, 810 aa, Bacillus thuringiensis A1462
MNQNYNNNGLEILDSGGVCSPRYPLANAPGSELQNMGYKEWLEMCSIKGAETFADKSTLSAQSQEGLRTAITIALSLLSNLPGPFGYPAKLLSIIFPFLWPTNTQAQWEAFMKVVEELVDQKIETFARDQAIQRLRGIQDVISLYQRDAKNFNDYPTSEPIQRQLLSQFTATNTFIVGSMSLFRVGRHEVPLLTTFVQAANLHLLLLRDAIMFGESWGMCPVTVAGYQNDFNNRIADYTDYSVSIYNQGLQKAKTLKANLRDYEKYPWARYYNSSVGPEFAYGDMENWNLYNNYRRDMTLMVLDLVALWPTYNPQQYPIAPKIQLTREIYTELRGNAGNTKRPSMDAIDAELIPPPRLFTWLESVDMHRWPTSAGYYYYTFQNAGIKHRYKYTLDSQTLTSSLRGASGNNFNLVPAEETINRVQNQHGEGLYTFSFYRSGQSDPFLNIGTTADKPYVSTMNRIPVEGDQTQANHRLSWITGMVIPELSIPAFGHYNPTYISCAAEGWTHLSVERSNEIKSDKITQIPAVKAFQLSNNASVVRGPGSTGGDLVQFSATSSGNKQLWIKVKPTTIALGRRFKVRIRYAAAANVTFTVQKCVTGVACWETATKSVTTTYSGTLTYNAFKYVDIFEIPANESEFSLEFLSTSGGPIYIDKIEFIPVNPIPEPPVPEGIYQIVTALNNSSVVDMDPGTWGTRHNVHLWQNNNTNNQKWRFVYNSSQGAYQIRNLADENLVLTREGANVKVVSYQNNNTAQYWIIEDAGNEYVYLKSKADPSRVLDVTGSSTQNGTNIQVWSNYGTLNQKFKLVKL

SEQ ID NO: 379 - protein, 1344 aa, Paenibacillus lentimorbus semadara
MNQYHNQNDNKSYNQSGNEMQIIQPSSNSLLYSPNKYPYATDPNVIAEGRSYKNWLDMCVGEGDGTRSLEAIAVAVGVRISHTIFRLLGVPYSAQGEQLFSFLLDTLWLEGNTQWEELMRHAEELINEQVPDYVRTKALAELTDLGNNLNLYIAAFEDWKRNPSSQEVRTRVIDRFNILDGLFEAYLPSFAVPGYEVPLLSVYANVVNIHLLVLRDSSIYGLDWGLSSTSVDNNYNRQQRNSATYANHCTTWYQTGLQRLQGSDASSWVNYNRFRREITLIVLDICALFSNYDVRSYPIQLRGELTRGIYTDPAVYSGTGSYSWLSQAPSFAEIENIAIREPSNFTWASYARVTTGTLEYLSSKNDFWKSHYMNYTETNSGILIQGPTYGMTTGTNIRIESVSMQEIYSVRLEAVAHAGAGGPFLGISTSEFFWSLGVRRYQNSRSPQFASQIITRQLPGVNSAVPSALDHSHELSYITAFPVRSVGTILVHEWTSTTVSRNNRIEPDKITQIPAVKSHTLSNCQVVSGTGFTGGNWLRPSDNGSFRLTITSFSSQSYRIRIHYASATFFYLDIRTGDTSNTFAVTPTTLSSGSQTVPYESFGFINIPYTFTTAPTESRYTFDFMFYSIGSANVLIDRIEIVPIGVPLFEYETKQQLEKARKAVNHLFTDGSKKALKEDTTDYEIDQAANVVDCISDECGHDKMILLDEVKYAKQLSQARNLLLNGNFDDLYSALEKENPWKTSPNVTIRQDNPIFKGHYLSMAGANDIEATNDTFPTYVYQKIDEAKLKPYTRYKVRGFVGSSKALELLVTRYNEEVDAILDVPDNIPHAPTPVCGEFDRCKPYSYPPLLPECNPEFINQMQPSSCHHNQMVDYNNMNTSTSTTMNPSMNPPLTPEIASSQSGFGRKHRKCHQAHQFEFHIDTGTIDLVEDLGIWVIFKICATDGYASLDDLEVIEEGALGVEALELVKKREKKWRHQKEQHCSQTKHKYDAAKHAVMALFTNKRYEKLKFETTISDILYADHLVQSIPYVYNKYVPEVPGMNYELYSELNTLVQNAFYLYDQRNLIKNGRFSNGLMHWQATPHARVEQEYEKSVLVLPNWDANVSQDLCIEHNRGYVLRVTARKEDPGAGNVTFSDCENHVDKLSFTSCDIATNAVPGAQANDPAAGVAYGQQGCQIDRVPYGQSGYRADGVAYEQSGHRTDGVPYRQSGYGTDGVTYEQSGHRADGVPYGQSGYRADGVAYEQSGHRADGVPYGQSGYGTDGVTYDQSANQTRKYHGCHTDGLPHPEHGCCYPDRVSDGQQLAYVTKSIDLFPDTDKVRIDIGETEGNFRVESVELICMEK

SEQ ID NO: 380 - protein, 1340 aa, Paenibacillus popilliae popilliae
MNQYQHQNDNKSYNQHGNEMQIIQPSSNSLLYSPNKYPYATDPNVIAEGRSYNNWLDTCVGVGDGTRSPETDAVAVGVRISHTIFRLLGVPYSAQGEQLFSFLLDTLWLEGNTQWEELMRHAEELINEQIPDYVRTKALAELTDLGNNLNLYIAAFEDWKRNPSSQEVRTRVIDRFNILDGLFEAYLPSFAVPGYEVPLLSVYANVANIHLLVLRDSSIHGLDWGLSSTSVDNNYNRQQRNSATYAIHCTTWYQTGLQRLQGSDASSWVNYNRFRREITLIVLDICALFSNYDVRSYPIQLRGELTRGIYTDPAVFSGTGSYSWLSQAPSFAEIENIAIREPSNFTWANYARVTTGTLEYLSSKNDFWKSHYMNYTETNSGILIQGPTYGMTTGTNIRIESVSMQEIYSVRLEAVAHAGAGGPFLGISTSEFFWSLGVRRYQNSRSPQFASQIITRQLPGVNSAVPSALDHSHELSYITAFPARSVGTILVHEWTSTTVSRNNRIEPDKITQIPAVKSHTLSNCQVVSGTGFTGGNWLRPSDNGSFRLTITSFSSQSYRIRIRYASATFFYLDIRTGDTSNTFAVTPTTLSSGSQTVPYESFGFINIPYTFTTAPTESRYTFDFMFYSIGSANVLIDRIEFVPIEGSLFEYETKQQLEKARKAVNHLFTDGSKKALKEDTTDYEIDQAANVVDCISDECGHEKMILLDEVKYAKQLSQARNLLLNGNFDDLYPALERENPWKTSPNVTIRRDNPIFKGHYLSMAGANDIEATNDTFPTYVYQKIDEAKLKPYTRYKVRGFVGSSKALELLVTRYNEEVDAILDVPDNIPHAPIPVCGEFDRCKPYSYPPLLPECNPEFINQMQPSSCHHTQMVDYNNMNMSTSTTMNPTLTPEIASSQSGFGRKHRKCHQAHQFEFHIDTGTIDLVEDLGLWVIFKICATDGYASLDDLEVIEEGALGVEALELVKKREKKWRHQKEQHCSQTKHKYDAAKHAVMALFTNTRYEKLKFETTISNILYADHLVQSIPYVYNKYVPEVPGMNYELYSELNTLVQNAFYLYDQRNLIKNGRFSNGLMYWQAAPHARVEQEFEKSVLVLPNWDANVSQDLCIEHNRGYVLRVTARKEDPGAGNVTFSDCENHVDKLSFTSCDIATNAVPGAQANDPAAGVAYGQQGCQIDRVPYGQSGYRADGVAYEQSGHRTDGVPYRQSGYGTDGVTYEQSGHRADGMPYGQSGYRADGVAYEQSGHRADGVPYGQSGYGTDGVTYDQSANQTRKYHGCHTDGLPHPEHGCCYPDRVSDGQQLAYVTKSIDLFPDTDKVRIDIGETEGNFRVESVELICMEK

SEQ ID NO: 381 - protein, 1332 aa, Paenibacillus lentimorbus semadara
MQIIQPSSNALLYSPNKYPYATDPNVIAEGRSYNNWLDTCVGVGDGTRSPEAYAIAEEAVGLSIDILAEIIYYLGFPIASPLTRALSAIAGQLFSSGDTLMQHIEQLINQKIAEYARNKALAEFQGLGRQYGLYLEALEDWEQNRLSQPHKERVRQTFRILDNSFTSSIPSFAVRNYEVPLLSVYADAANLHLLILRDSYIYGAFWGFDEDEYYRNYARQIRLSAEYANHCTTWYQTGLRRLQGTRATDWINYNRFRREMTLTVLDICALFSSYDIPSYPMGTKIQLTREIYTDPVVHSDWLQSTSPGLISFSSLENLVVRAPHLFTWLSRVTIDTGILSTVIGGQYSNNNFWRTHYQTLRTTGGTSFQSPTYGSTAFPIQRTNTLTFSGDVYTIESSVVTRSSLYGANSVAFTGTTGRSLYENPTVYPFAQKLIHELPGVDSGRPNATNYSHRLSYISGFSLGYSPSGTGLVYGWTSTTATRENNITLDDRIVQLPAVKGASLNNCQVVKGTGFTGGDWLKPNNNGTFSMYFAFRSAYTYHFRIRYASSASFSFVISEEYGRFPTTTVPLLSTMSPLPQNTPFEAFKTVDLPSTVTIRYTSAASTTFQLNFRFTVPGSANVLIDRIEFVPIEGSLFEYETKQQLEKARKAVNHLFTDGSKKALKEDTTDYEIDQAANVVDCISDECGHEKMILLDEVKYAKQLSQARNLLLNGNFDDLYPALERENPWKTSPNVTIRQDNPIFKGHYLSMAGANDIEATNDTFPTYVYQKIDEAKLKPYTRYKVRGFVGSSKDLELLVTRYNEEVDAILDVPDNIPHAPTPVCGEFDRCKPYSYPPLLPECNPEFINQMQPSSCHHNQMVDYNNMNTSTSTTMNPSMNPPLTPEIASSQSGFGRKHRKCHQAHQFEFHIDTGTIDLVEDLGIWVIFKICATDGYASLDDLEVIEEGALGVEALELVKKREKKWRHQKEQHCSQTKHKYDAAKHAVMALFTNTRYEKLKFETTISDILYADHLVQSIPYVYNKYVPEVSGMNYELYTELNTLVQNAFYLYDQRNLIKNGRFSNGLMYWQATPHARVEQEYDRSVLVLPNWDANVSQQLCIEHNRGYVLRVTARKEDPGAGNVTFSDCANHVDKLSFTSCDIATNAVPGAQANDPAAGVAYGQQGCQIDRVPYGPSGYRADGVAYEQSGHRTDGVPYRQSGYRADGVAHDQPGYRADGVAYEQSGYRADGVAYEQSGHRADGVPYGQSGYGTDGVTYDQSAKQTRKYHGCHTDGLPHPEHGCCYPDRVSDGQQLAYVTKSIDLFPDTDKVRIDIGETEGNFRVESVELICMEK

SEQ ID NO: 382 - protein, 405 aa, Paenibacillus lentimorbus semadara
MNQYHNQNDNKSYNQSGNEMQIIQPSSNALLYSPNKYPYATDPNVIAEGRSYKNWLDMCTGTGDTRSPEAAAISKGAVSAAITISTGLLGLLGVPFASQIGAFYTFLLNTLWPASNTQWEQFIAHVEELINAKLTDHVRNSALTKLNGLRNNIEIYNEALIVWKQDPNNSKLKDDVRSKFVGLNSQFEEYIPQFKEEGFEVQLLTIYAQSANLHLLLLRDSSLYGASWGFAQATIDNNYNRQIRKTAEYANHCTTWYQTGLQRLQGTTASSWLSYHRFRREMTLTVLDICALFSNYDARSYPLEVRGELTREIYTDPVAPGTNWIDRAPSFAEIENLVIRAPRTVTWISGDLIVYTGRLYGYTGNNDYWAAHRLDFLETNGYRFEGPTYGSTINISRTDSIPMNS

SEQ ID NO: 383 - protein, 686 aa, Bacillus thuringiensis entomocidus INA288
MNSYQNKNEYEILNAPSNNTNMPNRYPFANDPNAMMKNGNYKDWLDICNPEYRYSNPEAYRNTKAAMSFGVGLVSTILGVLGGPISVTLGAIIGVVTAVLEFIPADEYDNTKETWGVLIAAIKELIYEEIKGEAMNAAKAKLDGLYKVMKNYDNKLNVWKNGDKSPVEQNEIQRVFADTNNSFLLLISQFQQLGHEVSFLPLFAVAANFHLLLLRDVSIYGKEWGYTNNIIEGYHSDQLDMTQDYTNYAVDTYNKGLEEAKKIKNSDKLDWDFYNQYRRDMTLTVLDVIALFPTYDVRKYPISTKVELTREIYTDMINYINNPFMTNPVEGQRFAGYTVAQFNSIENALTREPHLFTWLKEVTGYFYAQYGQQSFMTGIQNTSYRTNYEDYPFSGPLHGVRYAGDTARSVDNNGKDVYSIYSTMFPLETNNHVHELRPGTAYYFGVKGHRHDATDRRTGNSSQKILGEDSKTGRIATGPSYFISEIPYYDKETNETIRPTPEKYNHRLSYISAYATDCGRISGVRGDGCFRTPQMCAWTHVSADPYNTIHPDKITQISAVKAFYIWDTGEGQVVSGPGFTGGDLVKLPYNARLKIRLKPTSTSKKYRVRVRYASMGAGTLRAEKWSPYGSVFSNFAYEYTGDSNKFNNFKYLETLSESFNISGVEIIIQNLSSSQLIVDKLEFIPI

SEQ ID NO: 384 - protein, 275 aa, Bacillus thuringiensis 89-T-34-22
MAIINLANELAIWAKRWCAARGYTYLVSGLQAHTGNYGRIYNYNMSVPDPIVTDNPTNAAMARGTTPNPTSQPIIRTISFNETLTDSQSTATEHGITAGAEVTVKSEAGLIFAKVGFEVKVSFQYNYTTTNTYTTETSRSWTDSLQITVPPGYVTEHTFIVQTGPYSKNVVLEADIAGHGWFNYSAPGYTGTGIVNITQVLYDNKVPGVTPYPDNFYARFRGSGKLEGKMGLQSFVNLVERPLLGRAGQVREYQIPVSLPSGLDIPIFDPVVSLQ

SEQ ID NO: 385 - protein, 338 aa, Bacillus thuringiensis dakota
MYNDKRMCSDPYQGMNKPHYCNCHTYNNSEITGGLQVDLDNQVVETFQSTTDVIREYLMFNELSALSSSPESVRSRFSSIYGTNPDGIALNNETYFNAVKPPITAQYGYYCYKNVGTVQYVNRPTDINPNVILAQDTLTNNTNEPFTTTITITGSFTNTSTVTSSTTTGFKFTSKLSIKKVFEIGGEVSFSTTIGTSETTTETITVSKSVTVTVPAQSRRTIQLTAKIAKESADFSAPITVDGYFGANFPKRVGPGGHYFWFNPARDVLNTTSGTLRGTVTNVSSFDFQTIVQPARSLLDEQQETLEYAIPGDPSGEQLQQMEQRMFFSKCQCPKWGN

SEQ ID NO: 386 - protein, 338 aa, Bacillus thuringiensis A1470
MYNDKRMCSDPYQGMNKPHYCNCHTYNNSEITGGLQVDLDNQVAETFQSTTDVIREYLMFNELSALSSSPESVRSRFFSIYGTNPDGIALNNETYFNAVKPPITAQYGYYCYKNVGTVQYVNRPTDINPNVILAQDTLTNNTNEPFTTTITITGSFTNTSTVTSSTTTGFKFTSKLSIKKVFEIGGEVSFSTTIGTSETTTETITVSKSVTVTVPAQSRRTIQLTAKIAKESADFSAPITVDGYFGANFPKRVGPGGHYYWFNPARDVLNTTSGTLRGTVTNVSSFDFQTIVQPARSLLDEQQETLEYAIPGDPSGEQLQQMEQRMFFSQCQCPKWGN

SEQ ID NO: 387 - protein, 304 aa, Bacillus thuringiensis
MYYTTQVTGGFQADLNNQVVETFQPSTNVIQEYLTFNDLPALGSSPQSVRSRFSSIYGTNPDGIALNNETYFSAVQPPITVQYGHYCYKNVGTVQYVNRPTDINPNVILAQDTLTNNTNEPFTTTITLTGSWTKSSTVTSSTTTGLKITTKLSIKKVFEIGGEVSFSTTIGSSEATSETFTVSKAVTVTVPAQSRRNIQLTAKIARESADFSAPITVDGYFGANFPRRVGPGGHYFWFNPARDVLNATSGTLRGTVTNVSSFDFQTVVQPAYSLLAEQQEALESAISGDPSEEQLKQIQQTIGL

SEQ ID NO: 388 - protein, 1134 aa, Bacillus thuringiensis CAA890
MNSNDSQNHDKLEICSNASLLSTPPYKTEYYEGEVLMDTIPFSSGKSAAQMGTSIVGQILGVLGVPFALQVTNLYSSLLDTLWPDGKSQWEIFMEQVEEIVDQKIENYARNKALAELEGLGNNFEVYLEALENWQSNTRDINDVKIRFISLDSLFTQSMPSFRIEGFQLPLLSVYAQAANLHLLLLRDATTFGKEWGLDSATMDSYYKRQKALSAEYSDHCVKWYKNGLNKLSKSTAKDWVKFNQFRREMTLTVLDVVALFPNYDAKIYPMQTVTQLTREVYTDPVGMTNLPNGIGSWYDIAPTFATIENAVIRKPHLFDFIRNLYVYFGDRGASANRSMKFWNGHEIFYANIGSSVFFQVYNYVKLGSNNYPYVFVDRDIYQTESLAGCIYDIIYPGYTYKFFGAPKVEFHVVDRRNNTGIFTFNPGFGQIIQNVQNSLSQLPLESLDEPAYEAYSHRLCHVTLVPPGNNSNYEGLPVYSWTHKSASLENVIYPDKITQIPAVKSFPGGQWGGVEAGPGFTGGDVTKSVTSEATTILRDVVKLAVTIPQDSIKQKYRVRIRYASQTDIPATFFTSDSGNRDFVLKSTTTAASNAFENYKEFQYIDIPGTIEFTKVNEIVTVYLHAYKVSNHHVNIDKVEFIPVDNNFEARKQLETSEFFAKKLLDTTKESLDREVTDYQIDYTAKLVECVSDELYPMEKQELLNIVTTAKKLSQDRNLLQDIDFSAINRENGWIGSRGIEGTEGNINFKSRSVRLPGARNIDGKIDSTYFYQKINASKLKPYTRYELRGRIESSKKLEIYLIHHNANRIIKNVNGNNSLLNSYNEIDPCISKCSNHILSIEEAELDMNNHTNFHEFSLCIDTGELDLNKNIGIWVAFKISDLNGYAELRNIECIEVEPLFGEALEKLKKQEQEWTRTENKQYEESKKIRAVAIKAVEQLFEDSSYQKLRPELDLSNISKAENLVNSIPYVSNDWFSYVPGINHNTVEELKTKIQLAFALYRHRNSIQNGDFKNGLNSWTVTSDVVVEENQIDPELVISNWSSQVSQDVVVEANHRYLLRVTAKKENVGIGYITIHDSTDNSKSIVFDDCEKNQDHYVTKTTEFIPSTDKVYIKIHETDGIFRIKNIDFTLNKK

SEQ ID NO: 389 - protein, 1177 aa, Lysinibacillus sphaericus IAB59
MDINNNNEKEIINSHLLPYSLLKKYPIKSLQSTNYKDWLNLCQDFNKDIESYDLVTAVSSGTIVVGTMLSAIYAPALIAGPIGIIGAIIISFGTLLPLLWNESENNPKTTWIEFIRMGEQLVDKTISQTVFNILESYLKDLKVNLVDYEKAKQDWIELKKQQLPGSPPSTKLRNAADIAHQRLDSLHNKFAELNKFKVEPYETILLPVYAQAANLHLNLLQQGAMFADQWIEDKYSSRNDTFAGNSNDYQNLLKSRTITYINHIENTYQNGLNYLWNQPEMTWDIYNEYRTKMTITALDLMALFPFYNKELYDPTVGIKSELTREIFINTPVEPHLHRYFKLSETEEKLTNNSDLFKWLTSLKFRTLYQPGFPFLIGNMNSFTNTNGTQLINNQQQLWSFPGTTENEEKLFPSPANIDQVTMYIYYGSGWGIPEPISTTINKLIFNHDKHELISEYDAGNTNAPTRSLSLGLPNHYLSCLNSYYPLTATTDGMNKEELKMYSFGWTHNSVDFLNEISKDKITQIPAVKAYRLTSNSRVIKGPSHIGGNLVYLSENSQMALTCRYTNSSPQEYKIRIRYASNRLNMGQLFTTFSSHQFVLPPTFNHFNIEQAKYEDYAYAEFPESMSIRGNLNSDILLILNILAGGELLLDKIEFIPLTQKVKDNLEKEKIDMLKNLTDSLFNSPSKDTLKIDSTDYQIDQIAFQIESINEEINPQEKMELLDNIKYAKKLNQLRNLLYSRESQAQIDWVTSNDVSIYHGKKPFNDYTLVMSRTSSSLSEITATNYQTYIYKKIEESKLKPYTRYLVRGFISNSEDLEIFISRYENEIHTNMNVHGDDDTLLNSDIRQNECESKLPIIFDATSQYSLSPSRTSGISNHSYYNNGHQSSCNDTHIFSFSIDTGEVDFNNYPGIEILFKLSNTNGYASISNLEVIEERLLTEEEKRQIIQIENRWKAKKESQRNETEKITTQAQQAINSLFTDTQYSNLKFETTKQNITEANTILENIPYVYNALLPTEPGMNFVLFNSFKDQINKAHALYKMRNLIKNGDFINDTKYWSISTDVKLEKVNKETILVLSSWEAQASQQILVQKQKRYLLRVIAKKEDMGRGNVIISDCLNNIAKIDFTPHDCNMNHIQNSSEFIIKTIHFSPNTEQVRIDIGQSDGVFKVESIELICVNY

SEQ ID NO: 390 - protein, 1177 aa, Lysinibacillus sphaericus 47-6B; identical to SEQ ID NO: 389

SEQ ID NO: 391 - protein, 1177 aa, Lysinibacillus sphaericus NHA15b; identical to SEQ ID NO: 389

SEQ ID NO: 392 - protein, 1129 aa, Lysinibacillus sphaericus LP1G
MDINNNNEKEIINSHLLPASLLKKHPIKSLQSTNYKDWLNLCQDFNKDIESYDLVTAVSSGTIVVGTMLSAIYAPAIIAGPIGVIGAIIISFGTLLPLLWSEDENNPKTVWIEFIRMGERLVDKTISQTVLNILESYLKDLKVNLIDYEKAKQDWIELKKQQLPGSPPSINLRNAADIAHQRLDSLHNKFAELNVFKVASYETILLPVYAQAANLHLNLLQQGAMFADQWIEDKYSPRNDTFAGNSNDYQDLLKSRTITYINHIENTYKDGLNYLWNQPEMTWDIYNEYRTNMTLTALDLLPLFPFYNKELYDPRVGIKSELTREVYINTPVDPHLHRYFKLGETEDKLTNNSELFKWLTSLKFRTFNQPGFPFLIGNMNYFKKTNGTQLINNQQQLWSFPGTTEIEKLFPSPANIDKVTMYIYYGSGWEVPEPISITINKLIFNHHKHGLITEYDAGNTNAPTMGIYVNLPKHYLSCLNSYYPLTATTNGMGKEELKMYSFGWTHESVDFLNEISNDKITQIPAVKAYNLNSNSRVIKGPGHIGGNLVYLSDKSQLSLACRYTNSSPQDFLIRIRYASNKRNMVQLFTPFSTHQFVLPQTFNHLNIEQTKYEDYEYAQLPGSLTINGNVNIDLLFLLNVLDGGELLLDKIEFIPLTQKVKDNLEKEKIDMLKNLTDSLFNSPAKDTLKINSTDYQIDQIAFQIESINEEINTQEKMKLLDNIKYAKKLNQLRNLLYSRESQAQIDWVTSNDVSIYHGKKPFNEYTLVMSGSSLSKITSSNYPTYIYKKIEESKLKPYTRYLVRGFISNSDNLEIFISRYENEIHTNMNVHVDDDTLLNSYKRQNECESKLPIVFDETSQYPLSPSRTSGISNHSYYNGAQQSSCHDTQIFSFSIDTGDVDFNEYPGIEILFKLSNSNGYASISNLEVIEERLLTEEEKRHIIEIENRWKAKKEIQRNETEKETTQAQQAINNLFTDTQYSKLKFETTKQSISKANAILENIPYVYNSLLPTEPGMNFELFNSFKDQINKAHTLYKMRNSIKNGDFINGTEYWSISTDVKLEKTNIETILVMSSWSAQSSQQILVQKQNRYLLRVIAKKEDMGSGNVTISDCLNNIAKIEFIPHDCNMN

SEQ ID NO: 393 - protein, 1129 aa, Lysinibacillus sphaericus 2173
MDINNNNEKEIINSHLLPASLLKKHPIKSLQSTNYKDWLNLCQDFNKDIESYDLVTAVSSGTIVVGTMLSAIYAPAIIAGPIGVIGAIIISFGTLLPLLWSEDENNPKTVWIEFIRMGERLVDKTISQTVLNILESYLKDLKVNLIDYEKAKQDWIELKKQQLPGSPPSINLRNAADIAHQRLDSLHNKFAELNVFKVASYETILLPVYAQAANLHLNLLQQGAMFADQWIEDKYSPRNDTFAGNSNDYQDLLKSRTITYINHIENTYKDGLNYLWNQPEMTWDIYNEYRTNMTLTALDLLPLFPFYNKELYDPRVGIKSELTREVYINTPVDPHLHRYFKLGETEDKLTNNSELFKWLTSLKFRTFNQPGFPFLIGNMNYFKKTNGTQLINNQQQLWSFPGTTEIEKLFPSPANIDKVTMYIYYGSGWEVPEPISITINKLIFNHHKHGLITEYDAGNTNAPTMGIYVNLPKHYLSCLNSYYPLTATTNGMGKEELKMYSFGWTHESVDFLNEISNDKITQIPAVKAYNLNSNSRVIKGPGHIGGNLVYLSDKSQLSLACRYTNSSPQDFLIRIRYASNKRNMVQLFTPFSTHQFVLPQTFNHLNIEQTKYEDYEYAQLPGSLTINGNVNIDLLFLLNVLDGGELLLDKIEFIPLTQKVKDNLEKEKIDMLKNLTDSLFNSPAKDTLKIDSTDYQIDQIAFQIESINEEINTQEKMKLLDNIKYAKKLNQLRNLLYSRESQAQIDWVTSNDVSIYHGKKPFNEYTLVMSGSSLSKITSSNYPTYIYKKIEESKLKPYTRYLVRGFISNSDNLEIFISRYENEIHTNMNVHVDDDTLLNSYKRQNECESKLPIVFDETSQFPLSPSRTSGISNHSYYNGAQQSSCHDTQIFSFSIDTGDVDFNEYPGIEILFKLSNSNGYASISNLEVIEERLLTEEEKRHIIEIENRWKAKKEIQRNETEKETTQAQQAINNLFTDTQYSKLKFETTKQSISKANAILENIPYVYNSLLPTEPGMNFELFNSFKDQINKAHTLYKMRNSIKNGDFINGTKYWSISTDVKLEKTNIETILVMSSWSAQSSQQILVQKQNRYLLRVIAKKEDMGSGNVTISDCLNNIAKIEFIPHDCNMN

SEQ ID NO: 394 - protein, 464 aa, Lysinibacillus sphaericus IAB59
MENQIKEEFNKNNHGIPSDCSCIKEGDDYNSLTEINAKEFSYCSPNMFNLNLPEQSTRFQTIASIHSNNCSFEILNNDPGYIYGDSVDGECRIAVAHRELGNGLERTGDDRFLFIFYALDNNNFIIANRHDGFVLQFLIANGQGVIVSREYQPNIHQEFTIQSINSDTFRLHSRDTNTFATVCWAQFNSWTKIVSRVDNPGAPNANLKHRSLLTDINMPQLPSLTPLQPLPRLTELEDGGLSPAQAPRAIIGRTLIPCLFVNDPVLRLENRIKQSPYYVLEHRQYWHRIWTDIFTAGERREYREVTGINNNAQNDMNKMINITIGADGPNRLRFGNLSTPFRQQIIDNSNTLGSFANTNYGTRTDIVNVFNSEFHQVRYARFVKAYEYRLTRADGSQVGTPWVVLDRKEMDLRTYPHNMAITLENVKIDNADNSYDLSIWKTPLKLKDGKIIIENHENSKPYYN

SEQ ID NO: 395 - protein, 464 aa, Lysinibacillus sphaericus 47-6B; identical to SEQ ID NO: 394

SEQ ID NO: 396 - protein, 464 aa, Lysinibacillus sphaericus NHA15b; identical to SEQ ID NO: 394

SEQ ID NO: 397 - protein, 464 aa, Lysinibacillus sphaericus 2173; identical to SEQ ID NO: 394

SEQ ID NO: 398 - protein, 467 aa, Lysinibacillus sphaericus LP1G
MENQIKEEFNKNNHGIPSDCSCIKEGDDYNSLTEVPSEINAKEFSYCSPNMFNLNLPEQSTRFQTIGSIHSNNCSFEILNNDPGYIYGDSVAGECRIAVAHRELGNGLERTGDDRFLFIFYALDNNNFIIANRHDGFVLQFLIANGQGVIVSREYQPNIRQEFTIQSINSDTFRLHSRDTNTFATVCWAQFNSWTKIVSRVDNPGAPNADLRHRSFLDINMPQLPSLTPLQPLPRLTGLEDGGLSPAQAPRAIIGRTLIPCLFVNDPVLRLESRIKQSPYYVLEHRQYWHRLWTDIFNAGERREYREVTGINHNAQNDMNNMINITIGSDGPNRLLFGHLSTPFRQQIISNSNTLGSFANSNYSSRTESITYLNTEFHQVRFARFVKAYEYRLTRADGTLVGTPWVVLDRKEMDLRTFPHNMTLNLENVKIVNADNSYDLSVWKTPLKLKDGKIIIENHENSKPYYN

SEQ ID NO: 399 - protein, 1180 aa, Bacillus thuringiensis israelensis
MNPYQNKNEYETLNASQKKLNISNNYTRYPIENSPKQLLQSTNYKDWLNMCQQNQQYGGDFETFIDSGELSAYTIVVGTVLTGFGFTTPLGLALIGFGTLIPVLFPAQDQSNTWSDFITQTKNIIKKEIASTYISNANKILNRSFNVISTYHNHLKTWENNPNPQNTQDVRTQIQLVHYHFQNVIPELVNSCPPNPSDCDYYNILVLSSYAQAANLHLTVLNQAVKFEAYLKNNRQFDYLEPLPTAIDYYPVLTKAIEDYTNYCVTTYKKGLNLIKTTPDSNLDGNINWNTYNTYRTKMTTAVLDVVALFPNYDVGKYPIGVQSELTREIYQVLNFEESPYKYYDFQYQEDSLTRRPHLFTWLDSLNFYEKAQTTPNNFFTSHYNMFHYTLDNISQKSSVFGNHNVTDKLKSLGLATNIYIFLLNVISLDNKYLNDYNNISKMDFFITNGTRLLEKELTAGSGQITYDVNKNIFGLPILKRRENQGNPTLFPTYDNYSHILSFIKSLSIPATYKTQVYTFAWTHSSVDPKNTIYTHLTTQIPAVKANSLGTASKVVQGPGHTGGDLIDFKDHFKITCQHSNFQQSYFIRIRYASNGSANTRAVINLSIPGVAELGMALNPTFSGTDYTNLKYKDFQYLEFSNEVKFAPNQNISLVFNRSDVYTNTTVLIDKIEFLPITRSIREDREKQKLETVQQIINTFYANPIKNTLQSELTDYDIDQAANLVECISEELYPKEKMLLLDEVKNAKQLSQSRNVLQNGDFESATLGWTTSDNITIQEDDPIFKGHYLHMSGARDIDGTIFPTYIFQKIDESKLKPYTRYLVRGFVGSSKDVELVVSRYGEEIDAIMNVPADLNYLYPSTFDCEGSNRCETSAVPANIGNTSDMLYSCQYDTGKKHVVCQDSHQFSFTIDTGALDTNENIGVWVMFKISSPDGYASLDNLEVIEEGPIDGEALSRVKHMEKKWNDQMEAKRSETQQAYDVAKQAIDALFTNVQDEALQFDTTLAQIQYAEYLVQSIPYVYNDWLSDVPGMNYDIYVELDARVAQARYLYDIRNIIKNGDFTQGVMGWHVTGNADVQQIDGVSVLVLSNWSAGVSQNVHLQHNHGYVLGVIAKKEGPGNGYVTLMDWEENQEKLTFTSCEEGYITKTVDVFPDTDRVRIEIGETEGSFYIESIELICMNE

SEQ ID NO: 400 - protein, 1180 aa, Bacillus thuringiensis israelensis HD522
MNPYQNKNEYETLNASQKKLNISNNYTRYPIENSPKQLLQSTNYKDWLNMCQQNQQYGGDFETFIDSGELSAYTIVVGTVLTGFGFTTPLGLALIGFGTLIPVLFPAQDQSNTWSDFITQTKNIIKKEIASTYISNANKILNRSFNVISTYHNHLKTWENNPNPQNTQDVRTQIQLVHYHFQNVIPELVNSCPPNPSDCDYYNILVLSSYAQAANLHLTVLNQAVKFEAYLKNNRQFDYLEPLPTAIDYYPVLTKAIEDYTNYCVTTYKKGLNLIKTTPDSNLDGNINWNTYNTYRTKMTTAVLDLVALFPNYDVGKYPIGVQSELTREIYQVLNFEESPYKYYDFQYQEDSLTRRPHLFTWLDSLNFYEKAQTTPNNFFTSHYNMFHYTLDNISQKSSVFGNHNVTDKLKSLGLATNIYIFLLNVISLDNKYLNDYNNISKMDFFITNGTRLLEKELTAGSGQITYDVNKNIFGLPILKRRENQGNPTLFPTYDNYSHILSFIKSLSIPATYKTQVYTFAWTHSSVDPKNTIYTHLTTQIPAVKANSLGTASKVVQGPGHTGGDLIDFKDHFKITCQHSNFQQSYFIRIRYASNGSANTRAVINLSIPGVAELGMALNPTFSGTDYTNLKYKDFQYLEFSNEVKFAPNQNISLVFNRSDVYTNTTVLIDKIEFLPITRSIREDREKQKLETVQQIINTFYANPIKNTLQSELTDYDIDQAANLVECISEELYPKEKMLLLDEVKNAKQLSQSRNVLQNGDFESATLGWTTSDNITIQEDDPIFKGHYLHMSGARDIDGTIFPTYIFQKIDESKLKPYTRYLVRGFVGSSKDVELVVSRYGEEIDAIMNVPADLNYLYPSTFDCEGSNRCETSAVPANIGNTSDMLYSCQYDTGKKHVVCQDSHQFSFTIDTGALDTNENIGVWVMFKISSPDGYASLDNLEVIEEGPIDGEALSRVKHMEKKWNDQMEAKRSETQQAYDVAKQAIDALFTNVQDEALQFDTTLAQIQYAEYLVQSIPYVYNDWLSDVPGMNYDIYVELDARVAQARYLYDTRNIIKNGDFTQGVMGWHVTGNADVQQIDGVSVLVLSNWSAGVSQNVHLQHNHGYVLRVIAKKEGPGNGYVTLMDCEENQEKLTFTSCEEGYITKTVDVFPDTDRVRIEIGETEGSFYIESIELICMNE

SEQ ID NO: 401 - protein, 1180 aa, Bacillus thuringiensis israelensis; identical to SEQ ID NO: 400

SEQ ID NO: 402 - protein, 1180 aa, Bacillus thuringiensis s. israelensis BRC-LLP29; identical to SEQ ID NO: 400

SEQ ID NO: 403 - protein, 145 aa, Bacillus thuringiensis LDC-9
SSLNFQQSYFIRIRYASNGSANTRAVINLSIPGVAELGMALNPTFSGTDYTNLKYKDFQYLEFSNEVKFAPNQNISLVFNRSDVYTNTTVLIDKIEFLPITRSIREDREKQKLETVQQIINTFYANPIKNTLQSELTDYDIDQGG

SEQ ID NO: 404 - protein, 1136 aa, Bacillus thuringiensis israelensis 4Q2-72
MNSGYPLANDLQGSMKNTNYKDWLAMCENNQQYGVNPAAINSSSVSTALKVAGAILKFVNPPAGTVLTVLSAVLPILWPTNTPTPERVWNDFMTNTGNLIDQTVTAYVRTDANAKMTVVKDYLDQYTTKFNTWKREPNNQSYRTAVITQFNLTSAKLRETAVYFSNLVGYELLLLPIYAQVANFNLLLIRDGLINAQEWSLARSAGDQLYNTMVQYTKEYIAHSITWYNKGLDVLRNKSNGQWITFNDYKREMTIQVLDILALFASYDPRRYPADKIDNTKLSKTEFTREIYTALVESPSSKSIAALEAALTRDVHLFTWLKRVDFWTNTIYQDLRFLSANKIGFSYTNSSAMQESGIYGSSGFGSNLTHQIQLNSNVYKTSITDTSSPSNRVTKMDFYKIDGTLASYNSNITPTPEGLRTTFFGFSTNENTPNQPTVNDYTHILSYIKTDVIDYNSNRVSFAWTHKIVDPNNQIYTDAITQVPAVKSNFLNATAKVIKGPGHTGGDLVALTSNGTLSGRMEIQCKTSIFNDPTRSYGLRIRYAANSPIVLNVSYVLQGVSRGTTISTESTFSRPNNIIPTDLKYEEFRYKDPFDAIVPMRLSSNQLITIAIQPLNMTSNNQVIIDRIEIIPITQSVLDETENQNLESEREVVNALFTNDAKDALNIGTTDYDIDQAANLVECISEELYPKEKMLLLDEVKNAKQLSQSRNVLQNGDFESATLGWTTSDNITIQEDDPIFKGHYLHMSGARDIDGTIFPTYIFQKIDESKLKPYTRYLVRGFVGSSKDVELVVSRYGEEIDAIMNVPADLNYLYPSTFDCEGSNRCETSAVPANIGNTSDMLYSCQYDTGKKHVVCQDSHQFSFTIDTGALDTNENIGVWVMFKISSPDGYASLDNLEVIEEGPIDGEALSRVKHMEKKWNDQMEAKRSETQQAYDVAKQAIDALFTNVQDEALQFDTTLAQIQYAEYLVQSIPYVYNDWLSDVPGMNYDIYVELDARVAQARYLYDTRNIIKNGDFTQGVMGWHVTGNADVQQIDGVSVLVLSNWSAGVSQNVHLQHNHGYVLRVIAKKEGPGNGYVTLMDCEENQEKLTFTSCEEGYITKTVDVFPDTDRVRIEIGETEGSFYIESIELICMNE

SEQ ID NO: 405 - protein, 1136 aa, Bacillus thuringiensis israelensis
MNSGYPLANDLQGSMKNTNYKDWLAMCENNQQYGVNPAAINSSSVSTALKVAGAILKFVNPPAGTVLTVLSAVLPILWPTNTPTPERVWNDFMTNTGNLIDQTVTAYVRTDANAKMTVVKDYLDQYTTKFNTWKREPNNQSYRTAVITQFNLTSAKLRETAVYFSNLVGYELLLLPIYAQVANFNLLLIRDGLINAQEWSLARSRGDQLYNTMVQYTKEYIAHSITWYNKGLDVLRNKSNGQWITFNDYKREMTIQVLDILALFASYDPRRYPADKIDNTKLSKTEFTREIYTALVESPSSKSIAALEAALTRDVHLFTWLKRVDFWTNTIYQDLRFLSANKIGFSYTNSSAMQESGIYGSSGFGSNLTHQIQLNSNVYKTSITDTSSPSNRVTKMDFYKIDGTLASYNSNITPTPEGLRTTFFGFSTNENTPNQPTVNDYTHILSYIKTDVIDYNSNRVSFAWTHKIVDPNNQIYTDAITQVPAVKSNFLNATAKVIKGPGHTGGDLVALTSNGTLSGRMEIQCKTSIFNDPTRSYGLRIRYAANSPIVLNVSYVLQGVSRGTTISTESTFSRPNNIIPTDLKYEEFRYKDPFDAIVPMRLSSNQLITIAIQPLNMTSNNQVIIDRIEIIPITQSVLDETENQNLESEREVVNALFTNDAKDALNIGTTDYDIDQAANLVECISEELYPKEKMLLLDEVKNAKQLSQSRNVLQNGDFESATLGWTTSDNITIQEDDPIFKGHYLHMSGARDIDGTIFPTYIFQKIDESKLKPYTRYLVRGFVGSSKDVELVVSRYGEEIDAIMNVPADLNYLYPSTFDCEGSNRCETSAVPANIGNTSDMLYSCQYDTGKKHVVCQDSHQFSFTIDTGALDTNENIGVWVMFKISSPDGYASLDNLEVIEEGPIDGEALSRVKHMEKKWNDQMEAKRSETQQAYDVAKQAIDALFTNVQDEALQFDTTLAQIQYAEYLVQSIPYVYNDWLSDVPGMNYDIYVELDARVAQARYLYDTRNIIKNGDFTQGVMGWHVTGNADVQQIDGVSVLVLSNWSAGVSQNVHLQHNHGYVLRVIAKKEGPGNGYVTLMDCEENQEKLTFTSCEEGYITKTVDVFPDTDRVRIEIGETEGSFYIESIELICMNE

SEQ ID NO: 406 - protein, 1135 aa, Bacillus thuringiensis israelensis
MNSGYPLANDLQGSMKNTNYKDWLAMCENNQQYGVNPAAINSSSVSTALKDAGAILKFVNPPAGSVLTVLSAVLPILWPTNTPTPERVWNDFMTNTGNLIDQTVTAYVRTDANAKMTVVKDYLDQYTTKFNTWKREPNNQSYRTAVITQFNLTSAKLRETAVYFSNLVGYELLLLPIYAQVANFNLLLIRDGPHKCTRMVYARSCDQLYNTMVQYTKEYIAHSITWYNKGLDVLRNKSNGQWITFNDYKREMTIQVLDILALFASYDPRRYPADKIDNTKLSKTEFTREIYTALVESPSSKSIAALEAALTRDVHLFTWLKRVDFWTNTIYQDLRFLSANKIGFSYTNSSAMQESGIYGSSGLVQIYLIKFNLILIVIKLLSQILAPPLIELQKWISTKFDGTLASYNSNITPTPEGLRTTFFGFSTNENTPNQPTVNDYTHILSYIKTDVIDYNSNRVSFAWTHNIVDPNNQIYTDAITQVPAVKSNFLNATARVIKGPGHTGGDLVALTSNGTLSGGRMEIQCKTSIFNDPTRSYGLRIRYAANSPIVIECDHMYYKEFLEEQRLVQNYVSRPNNIIPTDLKYEEFRYKDPNDAIVPMRLSSNQLITIAIQPLNMTSNNQVIIDRIEIIPITQSVLDETENQNLESEREVVNALFTNDAKDALNIGTTDYDIDQAANLVECISEGIISKEKMLLLDEVKNAKQLSQSRNVLQNGDFESRTLGWTTSDNITIQEDDPIFKGHYLHMSGARDIDGTIFPTYIFQKIDESKLKPYTRYLVRGFVGSSKDVELVVSRYGEEIDAIMNVPADLNYLYPSTFDCEGLIVVSVRCAANIWDTSDMLYSCQYDTGKKHVVCQDSHQFSFTIDTGALDTNENIGVWVMFKISSPDGYASLDNLEVIERGPIDGEALSRVKHMEKKWNDQMEAKRSETQQAYDVAKQAIDALFTNVQDEALQFDTTLAQIQYAEYLVQSIPYVYNDWLSDVPGMNYDIYVELDARVAQARYLYDTRNIIKNVDFTQGVMGWHVTGNADVQQIDGVSVLVLSNWSAGVSQNVHLQHNHGYVLRVIAKKEGPGNGYVTLMDCEENQEKLTFTSCEEGYITKTVDVFPDTDRVRIEIGETEGSFYIESIELICMNE

SEQ ID NO: 407 - protein, 1135 aa, Bacillus thuringiensis israelensis HD522
MNSGYPLANDLQGSMKNTNYKDWLAMCENNQQYGVNPAAINSSSVSTALKVAGAILKFVNPPAGTVLTVLSAVLPILWPTNTPTPERVWNDFMTNTGNLIDQTVTAYVRTDANAKMTVVKDYLDQYTTKFNTWKREPNNQSYRTAVITQFNLTSAKLRETAVYFSNLVGYELLLLPIYAQVANFNLLLIRDGLINAQEWSLACAGDQLYNTMVQYTKEYIAHSITWYNKGLDVLRNKSNGQWITFNDYKREMTIQVLDILALFASYDPRRLPADKIDNTKLSKTEFTREIYTALVESPSSKSIAALEAALTRDVHLFTWLKRVYFWTNTIYQDLRFLSANKIGFSYTNSSAMQESGIYGSSGFGSNLTHQIQLNSNVYKTSITDTSSPSNRVTKMDFYKIDGTLASYNSNITPTPEGLRTTFFGFSTNENTPNQPTVNDYTHILSYIKTDVIDYNSNRVSFAWTHKIVDPNNQIYTDAITQVPAVKSNFLNATAKVIKGPGHTGGDLVALTSNGTLSGRMEIQCKTSIFNDPTRSYGLRIRYAANSPIVLNVSYVLQGVSRGTTISTESTFSRPNNIIPTDLKYEEFRYKDPFDAIVPMRLSSNQLITIAIQPLNMTSNNQVIIDRIEIIPITQSVLDETENQNLESEREVVNALFTNDAKDALNIGTTDYDIDQAANLVECISEELYPKEKMLLLDEVKNAKQLSQSRNVLQNGDFESATLGWTTSDNITIQEDDPIFKGHYLHMSGARDIDGTIFPTYIFQKIDESKLKPYTRYLVRGFVGSSKDVELVVSRYGEEIDAIMNVPADLNYLYPSTFDCEGSNRCETSAVPANIGNTSDMLYSCQYDTGKKHVVCQDSHQFSFTIDTGALDTNENIGVWVMFKISSPDGYASLDNLEVIEEGPIDGEALSRVKHMEKKWNDQMEAKRSETQQAYDVAKQAIDALFTNVQDEALQFDTTLAQIQYAEYLVQSIPYVYNDWLSDVPGMNYDIYVELDARVAQARYLYDTRNIIKNGDFTQGVMGWHVTGNADVQQIDGVSVLVLSNWSAGVSQNVHLQHNHGYVLRVIAKKEGPGNGYVTLMDCEENQEKLTFTSCEEGYITKTVDVFPDTDRVRIEIGETEGSFYIESIELICMNE

SEQ ID NO: 408 - protein, 1136 aa, Bacillus thuringiensis israelensis; identical to SEQ ID NO: 404

SEQ ID NO: 409 - protein, 79 aa, Bacillus thuringiensis LDC-9
MKSLHKDPFEAIVPMTLSSNQLITIAIQPLNMTSNNQVIIDRIEIIPITQSVLDETENQNLESEREVVNALFTNDAKDA

SEQ ID NO: 410 - protein, 1230 aa, Bacillus thuringiensis Y41
MNSYENKNEYEILDASQNNSNMSNRYQRYPLAHNPQTSIQTTNYKDWLRMCENPLDMEGYDSNSVVVVSTGLIVVGTLISILSAGLGSIPIIYGTLLPVLWNDPNNPQKTWHEFMSHGETLLNQTISTVERNRAAAYLEGYTTAVKKCEEALNVWLKTPNQANARTVADLYKDTDFLFFTTLPHLKLRGYETLLLSSYTQAANMHLILLKQASKYADQWNAQLSVSVQKTANDYYTDLVKLIGEYTDYCIATYRLGLTTIKSRATSWNIYNMYRREMTILVLDLVALFPAHDIKKYPSGTKVELTREIYTDALGAVALPQNIDATEQLATRAPNLFSWLKGFKFITTQSTNRYYLSGIANQYSFTNSNGEIWGPISGNPTGVSSDLTIDNNFSIYKLSILRGYQLSPDFSFHNPVHQIDFSTTNNQQGRVQSYKSGGPTPVNPETTAIHLPIDSKCIQNCNPTFNNYSHILSYAKTFTSNLTIGTTANITSFGWTHNSVDRENTIDLNNITQIPAVKASQVYPENSVIKGPGHTGGNLVRIDSSGYMSIVCKFPLQVKGYRVRIRYAANNRAELYISSAGNSPSKNVDLDPTFSGTNYESLNYTNFKDKETEFIITEGQLVKQSIIFSTNGNVLLDKIEFIPLGTTTYEYEEKQNLEKAQKALNALFTDSTNGYLQMDTTDYDINQTASLIECVSDELYAKEKIVLLDEVKYAKRLSISRNLLLKDDLEFSAGFGENGWTTSDNISIQADNPIFKGNYLKMFGARDIDGILFPTYLYQKIEESKLKPYTRYRVRGFVGSSKDLKLVVTRYEKEIDAIMNVPNDLAHMQLNPSCGDYRCESSSQFLVNQVHPTPTAGYALDRYARPSSSDKKHIMCHDRHPFDFHIDTGELNPNTNLGIDVLFKISNPNGYATLGNLEVIEEGPLTDEALVHVKQKEKKWRQHMEKKRMETQQAYDPAKQAVDALFTNEQELDYHITLDYIKNADQLVQAIPYVHHAWLPDAPGMNYDVYQGLNARIMQAYNLYDARNIIINGDFTQGLQGWHATGKAAVQQIDGASVLVLSNWSAEVSQNLHAQDHHGYMLRVIAKKEGPGKGYVTMMDCNGKQETLTFTSCEEGYITKTIEVFPESNRIRIEMGETEGTFYVDSIELLCMQGYASNNNPHTGNMYEQSYNGNYNQNTSDVYHQGYINNYNQNSSSMYNQNYINNDDLHSGCTCNQGHNSGCTCNQGYNR

SEQ ID NO: 411 - protein, 1157 aa, Bacillus thuringiensis HS18-1
MNSYQNKNEYEILDASQNNSNMSNRYQRYPLAHNPQTSIQTTNYKDWLKMCQNPHQNPLDMEGYDSNSVVVVSTGLIVVGTLISILSAGLGSIPIIYGTLLPVLWNDPNNPQKTWHEFMSHGETLLNQTISTVERNRAAAYLEGYTTAVKNVKKHLNVWLKTPNQANARTVADLYKDTDFLFFTTLPHLKLRGYETLLLSSYTQAANMHLILLKQASKYADQWNAQLSVYVQKTANDYYTDLVKLIGEYTDYCIATYRLGLTTIKSRATSWNIYNMYRREMTILVLDLVALFPAHDIKKYPSGTKVELTREIYTDALGAVALPQNIDAIEQLATRAPNLFSWLKGFKFITTQSTNRYYLSGIANQYSFTNSNGEIWGPISGNPTGVSSDLTIDNNFSIYKLSILRGYQLSPDFSFHNPVHQIDFSTTNNQQGRVQSYKSGGPTPVNPETTAIHLPIDSKCTQNCNPTFNNYSHILSYAKTFTSNLTIGTTSNIHFVWLDAQSVDRENTIDLNNITQIPAVKASQVYPENSVIKGPGHTGGNLVRIDSSGYMSIVCKFPLQVKGYRVRIRYAANNRAELYISSAGNSPSKNVDLDPTFSGTNYESLNYTNFKDKETEFIITEGQLVKQSIIFSTNGNVLLDKIEFIPLGTTTYEYEEKQNLEKARKALNALFTDGTNGYLQMDTIDYDINQTANLIECVSDELYAKEKIVLLDEVKYAKRLSISRNLLSKDYLEFSDVFEENGWTTSDNISIQADNPIFKGNYLKMFGARDIDGTLFPTYLYQKIEESKLKPYTRYRVRGFVGSSKDLKLVVTRYEKEIDAIMNVPNDLAHMQLNPSCGDYRCESSSQFLVNQVHPTSTAGYALDMYACPLSSDKNHVMCHDRHPFDFHIDTGEVGTNTNVGIDVLFKISNPDGYATVGNLEVIEEGPLTGDALAHVKHKEKKWKQHMEKKRWKTQQAYDPAKQAVDALFTNEQELHYHITLDHIQNADRLIQAIPYVYHAWLPSAPGMNYDGYQGLNARIMQARYLYDARNIITNGDFTQGLTGWHAAGKATVQQMNGASVLVLSNWSAGVSQNLHVQDHHGYVLRVIAKKEGPGKGYVTMMDCNGNQETLKFTSCEEGYMTKTVEVFPESDRVRIEMGETEGTFYIDSIELICMNE

SEQ ID NO: 412 - protein, 1136 aa, Bacillus thuringiensis Ywc2-8
MSNRYQRYPLAHNPQTSIQTTNYKDWLKMCQNPHQNPLDMEGYDSNSVVVVSTGLIVVGTLISILSAGLGSIPIIYGTLLPVLWNDPNNPQKTWHEFMSHGETLLNQTISTVERNRAAAYLEGYTTAVKKCEEALNVWLKTPNQANARTVADLYKDTDFLFFTTLPHLKLRGYETLLLSSYTQAANMHLILLKQASKYADQWNAQLSVYVQKTANDYCTDLVKLIGEYTDYCIATYRLGLTTIKSRATSWNIYNMYRREMTILVLDLVALFPAHDIKKYPSGTKVEPTREIYTDALGAVALPQNIDAIEQLATRAPNLFSWLKGFKFITTQSTNRYYLSGIANQYSFTNSNGEIWGPISGNPTGVSSDLTIDNNFSIYKLSILRGYQLSPDFSFHNPVHQIDFSTTNNQQGRVQSYKSGGPTPVNPETTAIHLPIDSKCTQNCNPTFNNYSHILSYAKTFTSNLTIGTTSNITSFGWTHNSVDRENTIDLNNITQIPAVKASQVYPENSVIKGPGHTGGNLVRIDSSGYMSIVCKFPLQVKGYRVRIRYAANNRAELYISSAGNSPSKNVDLDPTFSGTNYESLNYTNFKYKETEFIITEGQLVKQSIIFSTNGNVLLDKIEFIPLGTTTYEYEEKQNLEKARKALNALFTDGTNGYLQMDTTDYDINQTANLIECVSDELYAKEKIVLLDEVKYAKRLSISRNLLSKDYLEFSDVFEENGWTTSDNISIQADNPIFKGNYLKMFGARDIDGTLFPTYLYQKIEESKLKPYTRYRVRGFVGSSKDLKLVVTRYEKEIDAIMNVPNDLAHMQLNPSCGDYRCESSSQFLVNQVHPTPTAGYALDMYACSLSSDKKHVMCHDRHPFDFHIDTGEAGTNTNVGIDVLFKISNPDGYATVGNLEVIEEGPLTGDALAHVKHKEKKWKQHMEKKRWKTQQAYDPAKQAVDALFTNEQELHYHITLDHIQNADRLIQAIPYVYHAWLPSAPGMNYDGYQGLNARIMQARYLYDARNIITNGDFTQGLTGWHAAGKATVQQMNGASVLVLSNWSAGVSQNLHVQDHHGYVLRVIAKKEGPGKGYVTMMDCNGNQETLKFTSCEEGYMTKTVEVFPESDRVRIEMGETEGTFYIDSIELICMNE

SEQ ID NO: 413 - protein, 1157 aa, Bacillus thuringiensis MC28
MNSYQNKNEYEILDASQNNSNMSNRYQRYPLAHNPQTSIQTTNYKDWLKMCQNPHQNPLDMEGYDSNSVVVVSTGLIVVGTLISILSAGLGSIPIIYGTLLPVLWNDPNNPQKTWHEFMSHGETLLNQTISTVERNRAAAYLEGYTTAVKNVKKHLNVWLTAPNQANARTVADLYKDTDFLFFTTLPHLKLRDFETLLLSSYTQAANMHLILLKQASKYADQWNAQLPVSVRKTANDYYTDLVKLIGEYTDYCIATYRSGLNTIKSRATSWNIYNMYRREMTILVLDLVALFPAYDIKKYPSGTKVELTREIYTDALGAVAIPQNIDATEQLATRAPNLFSWLKGFKFITTQSTNRYYLSGIANRYSFTNSNGEIWGPISGNPTGVSSDLTIDNNFSIYKLSILRGYQLSPDFSFHNPVHQIDFSTTNNQQGRVQSYKSGGPTPVNPETTAIHLPIDSKCTQNCNPTFNNYSHILSYAKTFTSNLTIGTTSNITSFGWTHNSVDRENTIDLNNITQIPAVKASQVYPENSVIKGPGHTGGNLVRIDSSGYMSIVCKFPLQVKGCRVRIRYAANNRAELYISSAGNSPSKNVDLDPTFSGTNYESLNYTNFKDKETEFIITEGQLVKQSIIFSTNGNVLLDKIEFIPLGTTTYEYEEKQNLEKAQKALNALFTDGTNGYLQMDATDYDINQTANLIECVSDELYAKEKIVLLDEVKYAKRLSISRNLLLNDDLEFSDGFGENGWTTSDNISIQADNPLFKGNYLKMFGARDIDGTLFPTYLYQKIDESRLKPYTRYRVRGFVGSSKNLKLVVTRYEKEIDAIMNVPNDLAHMQLNPSCGDYRCESSSQFLVNQVHPTPTAGYAPDMYACPSNSDEKHVMCHDRHPFDFHIDTGELNPNTNLGIDVLFKISNPNGYATLGNLEVIEEGPLTDEALVHVKQKEKKWRQHMEKKRMETQQAYDPAKQAVDALFTNEQELHYHITLDHIQNAGRLVQLIPYAHHAWLLDVPGMNYDVYTELNVRITQARYLYKERNVITNGDFTQGLTGWQETGKATVQQMDGASVLVLSNWSAGVSQNLHVQDQHGYVLRVTAKKEGPGKGYVTMMDCNGKQETLRFTSCEEGYMTKTVEVFPESDHVRIEMGETEGTFYIDSIEFLCMKG

SEQ ID NO: 414 - protein, 679 aa, Bacillus thuringiensis sotto
MNLYQNKNEYEILDASRNNSNMSNSYLRYPLESNPNQPLQKTNYKDWVNMCKGNPGGFLLSDEQYVAIVGTVISKLLGFVPVVGDILSFLADTYWPKIAGQEVDTRVWAGLIRHTANLISVENYQDALIKATTNLMGLYGALNVYNRFLADWKKSGMVFNGTLADELRKQMSTLHLMFTQTIIRDFSQPGYQAILLPSYTSAANLHLLLLRDIEIYGKELGFSQQVLDSYYRELILFTKEYTTHCVDTYNAALNAQKQKGWIAFNHYRRNMTLTVLDVITLFPSYDARKYPADKKDVKKLSKTELTREIYTAFLETSPNQTVEIMEASLTRDPHIFTWIKRLDFWTDTLYPDNKFLSANRNGFSYTNSSTVQESIVYGDSGFGSTLTHAIPINSNIYKVSITDTRSIPNRIPQVDFHKMDGTLTSYSSGIKLPPEELRTTFFGFSTNENTPNQPNSSDYTHILTYMKTGIISGGAPKRVSLAWAHKSVNPYNQIFTDDITQVPAVKSSLLNVQAKVIKGPGHTGGDLVALINNNLQAGRMDITCKTSNFNESERRYGLRIRYAANNSFSIYVSYVSSEGSIRQTSRIIESTFSRPNNIIPTDLKYDEFKYNEAFDAILPVRLSPNQSTTISIYQTNALPANQLIIDRIEFIPITQSVLDYTEKQNLEKSQKTVNNLFVS

SEQ ID NO: 415 - protein, 679 aa, Bacillus thuringiensis S2160-1
MNSYQNTNEYEILDASPSYSNMTNSYPRYPLANNRQGSMKNTNYKDWLAMCEGNVEGLFLTDEQMVSIVGAAISKLLGFVPVVGDILSSLADTYWPKIAGQEADTRVWAGLIRHTANLIDNRDVDRVIGQATANVMSLYAALGVYNRFLEQWKSPVKPYAGLADEIRAQMSTLHLLFTTKIISDFTIQGYEAILLPSYANAASLHLLLLRDISIYGEKLGFDSKTLQAYHNEQVKFTTDYTAHCIKTYNLNLNAQKSKGWVAFNQYRRDMTLTVLDLIALFPSYDTHRYPADEKNVKKLSNTELTREIYTALTESSPSKTVEAMEESLTRGPHLFTWPKRLDFWTFNYNMYPDTRYLSANRIGFSYTNSSEIEDSGIYGSPTFGTVLTHQIPLNSNVYRTSITDTTAVPNQVTKMDFYKIDGTNASYNSNITPVPANLRTTFFGFSSDANRPPNQPTVQDYNNILSYIKTDIIGGHQARVSFAWTHKGVNPNNQILTDNVTQVPAVKSSLLNAPARVIKGPGHTGGDLVALLNNGTQAGTMQIQCKTGSFTETSRRYGIRMRYAANNAFTVSLSYTLQGGNPIGITFGTERTFSRTNNIIPTDLKYEEFKYKEYNQIITMNSPQNTIVTIDIRQLNPSSNDQLIIDRIEFIPITQSVLDYTEEQNLETAQAVVDNLFTN

SEQ ID NO: 416 - protein, 679 aa, Bacillus thuringiensis S3161-3
MNSYQNTNEYEILDASPSYSNMTNSYPRYPLANNRQGSMKNTNYKDWLAMCEGNAEGLFLTDEQMVSIVGAAISKLLGFVPVVGDILSSLADTYWPKIAGQEADTRVWAGLIRHTANLIDNRDVDRVIGQATANVMSLYAALGVYNRFLEQWKSPVKPYAGLADEIRAQMSTLHLLFTTKIISDFPIQGYESILLPSYANAASLHLLLLRDISIYGEKLGFDSKTLQAYHNEQVKFTTDYTAHCIKTYNLNLNAQKSKGWVAFNQYRRDMTLTVLDLIALFPSYDTHRYPADEKNVKKLSNTELTREIYTALTESSPSKTVEAMEESLTRGPHLFTWPKRLDFWTFNYNMYPDTRYLSANRIGFSYTNSSEIEDSGIYGSPTFGTVLTHQIPLNSNVYRTSITDTTAVPNQVTKMDFYKIDGTNASYNSNITPVPANLRTTFFGFSSDANRPPNQPTVQDYNNILSYIKTDIIGGHQARVSFAWTHKGVNPNNQILTDNVTQVPAVKSSLLNAPARVIKGPGHTGGDLVALLNNGTQAGTMQIQCKTGSFTETSRRYGIRMRYAANNAFTVSLSYTLQGGNPIGITFGTERTFSRTNNIIPTDLKYEEFKYKEYNQIITMNSPQNTIVTINIRQLNPSSNDQLIIDRIEFIPITQSVLDYTEEQNLETAQAVVDNLFTN

SEQ ID NO: 417 - protein, 309 aa, Bacillus thuringiensis F14-1
MIFLAILDLKSLVLNAINYWGPKNNNGIQGGDFGYPISEKQIDTSIITSTHPRLIPHDLTIPQNLETIFTTTQVLTNNTDLQQSQTVSFAKKTTTTTSTSTTNGWTEGGKISDTLEEKVSVSIPFIGEGGGKNSTTIEANFAHNSSTTTFQQASTDIEWNISQPVLVPPRKQVVATLVIMGGNFTIPMDLMTTIDSTEHYSGYPILTWISSPDNSYNGPFMSWYFANWPNLPSGFGPLNSDNTVTYTGSVVSQVSAGVYATVRFDQYDIHNLRTIEKTWYARHATLHNGKKISINNVTEMAPTSPIKTN

SEQ ID NO: 418 - protein, 309 aa, EG2934
MAILDLKSLVLNAINYWGPKNNNGIQGGDFGYPISEKQIDTSIITFTHPRLIPYDLTIPQNLETIFTTTQVLTNNTDLQQSQTVSFAKKTTTTTSTSTTNGWTEGGKISDTLEEKVSVSIPFIGEGGGKNSTTIEANFAHNSSTTTFQQASTDIEWNISQPVLVPPSKQVVATLVIMGGNFTIPMDLMTTIDSTEHYSHYSGYPILTWISSPDNSYSGPFMSWYFANWPNLPSGFGPLNSDNTVTYTGSVVSQVSAGVYATVRFDQYDIHNLRTIEKTWYARHATLHNGKKISINNVTEMAPTSPIKTN

SEQ ID NO: 419 - protein, 695 aa, Bacillus thuringiensis Y41
MNFYQNTNEYEILDASQNNSTMSNRYPRYPLANNPQMPMRNTNYKDWLNMCEGNPAPLSSPSQLLKVAGNIVPRILGTLPTFFPGIGPFVPFLTFFTGLLWPSGSSGNDIWEKVMKEVADLIDQRLEENILRQATANLAGLKELLQSYNSAFATWEAGNATPGLVKGYMESLHRTFVQDIIGSFTIPNYENILLPTYAIAANFHLMLLRDIEIYGGEKTPEGKDGLNFNPKDLNFYNCELKKYKELYTNHCLNTYDKGLASEKEKGWVPFHRYRREMTLAVLDIIASFPLYDARLYPAKNNKEMSVKSELTREIYSDVINSDRFGVVPPYNYAQNEERYTRPPHLFTWLRGLDFVTNRLTSGSYSYRWYVLTGCQNKYSYTKGNGTIPGPFRGYPVESGGSASNITIEEGSYIYNLLPKSFEYISPWYFTTNIAMITFLLTNNKNDLPAKFYGSLVNQPNLPIVQTDFDFVTNKELTGPPTYNNYSHILSHMLLGYDWNQTGGIGTHGYSFAFTHSSVDPYNTIAPDKITQIPAVKAFEISDSGPGYVVAGRGDTGGDIVWLKNSARLKIRLTSATPNKNYLVRVRCMARISGNILVERWSLSSTKNDTFGVQGTLKYEYVNTLVTTFDQPGVELIIKNLTGNDMYFDKVDFIPIDIPIDKCTKCQFVGGVCTCSCPTLQSLDTEKEIVNSLFVE

SEQ ID NO: 420 - protein, 703 aa, Bacillus thuringiensis BM59-2
MNSYQNKNEYEILDASQNNSNMSNRYPRYPLANDPQASMQNTNYKDWLATCNGTPAPLYNSSQLLKISGNVVSRALGMLPIPGIAPLLSFLSTLLWPSGSSGNTIWESLMKEAADLIDQKLEENILRQATANLAGLQGLLGSYNSAFASWEAGGNATPDLVKGYMESLHRTFVQDIIGSFTIPGYEKILLPTYAITANFHLMLLRDIEIYGGKKTPEGKDGLNFDPKDLNFYNCELKKYKELYTNHCLNTYNKGLASEKEKGWVPFHRYRREMTLAVLDIIALFPLYDARLYPAKNNKEMPVKSELTREIYSDVINSDRFGVVPPYNYAQNEERYTRPPHLFTWLRGLDFVTNVLTSGTWVYRWSVLTGLSKEIFLYKREWYYNWSFSGLSCRVWWKNFQHYYCRRFLYLELVAKKLSIYFPLVFYDKYRTDYFLTNKNNSSTEKVYGYVAGNANLPTVQTDFDFLTNKEVTGPPTYNNYNHILSYLLLGYDWNQTGGIGTHGYSFAFTHSSVDPYNTIAPDKITQIPAVKAFEISDAGPSQVIAGPGHTGGDVVRLYLSGRLKIRLTPASTNKNYLVRVRYASPVSGTLRVERWSPSSVTNRDFTRLATGGFNSFGYVDTLVTTCNQSGVEIIIQNLGASDVIIDKVEFIPYDIPIDKCTKCEFEGNVCTCRCEGVQSLEKEKEIVNSLFVKENKVCTEVGG

SEQ ID NO: 421 - protein, 669 aa, Bacillus thuringiensis Y41
  MISC_FEATURE (522)..(522): Xaa is Ala, Arg, Asn, Asp, Asx, Cys, Glu, Gln, Glx, Gly, His, Ile, Leu, Lys, Met, Phe, Pro, Ser, Thr, Trp, Tyr, or Val.
MNSYQNKNEYEILDASQNNSTMSNHYPRYPLAKDPLASMQNTNYKDWLNLCDTPNMENPEFQSVGRSALSILINLSSKILSLLGIPFAAQIGQLWSYTLNLLWPVANNATQWDIFMRTIEDLINVRIETSVRNRALAELEGLGNILEDYKVALRRWDLNPTNLDRQSEVVSQFEIVHAFFRVQMPVFAIRDFEVPLLPVYASAANLHLLLLRDVVINGDRWGLSAARINDYHDLQLRLTSTYTDHCVNWYNTGLNRLIGTNARQWVTYNQFRREMTISVLDIISLFSNYDARRYPTKTQSELTRMIYTDPIGAVGTIGLNPGWLDNAPSFSVIENSVVQSPRTFLFLERVGIFTGVLHGWSSQSQFWSAHRLFLSNLSSIWESIIYGNPQNNIGYEEVDFTNFDVFSINSRATSIMSPFGGGELFGVPRVTFDLSNRTNNSLAQRTYNRPFTFGGQDIVSRLPGETTEIPNSSNFSHRLAYISSFRVGIAGSVLSYGWTHHSVDRHMRLNPNMITQIPAVKXVSGHIVSGPGHTGGDILRVHSGSQGTIIIQSNSAQRYRLRLRYSSTLPGDLILNHRGTDGSQQFIEFTLPATSGQLRFADFTYADGRTVFQTPNSHVFYTVHVQTRSNGIFFIDKIDYIPENTPPLECGGERNLEKEKKAVNDLFTN

SEQ ID NO: 422 - protein, 668 aa, Bacillus thuringiensis MC28
MNSYQNKNEYEILDASQNNSNMSTHYPRYPLAKDPQASMQNTNYKDWLNLCDTPNMENPEFQSVGRSALSILINLSSRILSLLGIPFAAQIGQLWSYTLNLLWPVANNATQWEIFMRTIEDLINVHIETSVRNRALAELAGLGNILEDYKVVLQRWNLNPTNPTLQRDVVRQFEIVHAFFRFQMPVFAVAGFEVPLLPVYASAANLHLLLLRDVVINGARWGLESDVINDYHDLQLRLTSTYVDHCVTWYNTGLNRLIGTNARQWVTYNQFRREMTISVLDIISLFSNYDVRRYPTKIQNELTRMIYTDPVGTEGNQFIPGWLDNAPSFSVIENSVVRSPGAFTFLERVGIFTGFLHGWSSRSEFWSAHRLFSRPVLGGIWESVIFGNPQNNIGYQEVDFTNFDVFSINSRATSHMFPNGSARLFGVPQVTFNLSNINNNSPAQRIYNRQFTFGGQDIVSRLPGETTEIPNSSNFSHRLAHISSFPVGNNGSVLSYGWTHHSVNRHNRLNPDMITQIPAVKGIGGQIVSGPGHTGGDILRFNRLNQGTIVVQSNSAQRYRIRLRYSSSLPGDLILNHIGSDGSQQFIEFTLPATSGQLRFADFTYADGRTVFQTPNSHVFYTVHVQTRSDATVFIDKIDYIPENTPTLERGGERYLEKEKKVVNDLFT

SEQ ID NO: 423 - protein, 673 aa, Bacillus thuringiensis MC28
MSMKSLIQRIYLVLLTEILTILDTLLQIIRINHYKNWINMCQKNQQYGENLETFASADTIAGVSAGVIVVGTMLGAFAAPITAGLIISFGTLLPIFWKPGEDPKTVWQAFLKIGNRPFSSPVDQALIDLLSNKARSLESQFNDFQRYFDIWNNNKTPGNAGEVLRRFSSLDADIIRELEQLKGNYYITVLPGYAQVANWHLNLLRIAAFYYDQWASSSNLSIQSIYPEDYINDLQTCLTNCAIESGNKISSKYYKCVLKCRINEYINYCSKTYQEGLNILKNSSGLKWNEYNTYRREMTLNVLDLIAVFPNYDPDKYLISTKSQLTREIYTDALIDAFANAHFNINDIENSLTRPPGLVTWINRLDFYTGMFTKSVPGLTANGINYSFTNGNSNDSPIYGYRLSDDSSTPIQIPRNQYVYNMLITYLRDSPSVIQKIEFNLNNQQTRTYDTGLTLAPTYQSTINLSLPGKDRSFPPKFNNYTHFLSYVKTAPGDERPSSSRARNVCFGWMHFSVNDYDVLAGGYNTISNKIITQIPAVKARHLPLPSFVMPGPGHTGGNLVVLSTQIEFQCIVLNPVSYKIRMRYVAYSPNRSINLTVSIRSEIGNYQNIVPNISSTVQSPEDTKNPKYEHFQYLDISIPLELFGITNITITRSDSISNNTLIIDKIEFTPDV

SEQ ID NO: 424 - protein, 699 aa, Bacillus thuringiensis S2160-1
MNHNNNNNKYEIIDSHASPYPSNKNSNHSRYPYTNNTNYKDWLNICQQNQQYDEGFETFESADTIAAVSAGIIVAGTMLSAFTSPLGPALIISFGTLLPIFWKPGEDPKTVWKAFVKIGYRPFGLPVDEAIVNLLYNKVDALKTQFEDYQRYFDIWKANPTSQNADAVKNKFLTLDTLVIGTLQELKKDYAIILLPGYTQIANWHLNLLRQAADNYDKWAPSSNLSIQSIYPQDYISDLNTCLTNCSTESNNKVSSKYYKCILKCRTAEYINHCSEKYQDGLNQLKNSSNINWDIYNAYRREMTFTVLDHIAIFPNYDPEKYPTGTHSELTREIYTDAVMRRYETGSPIPIAQREQELTRTPHLFSRLNKFTLFTAKNILPGLHAVQNHFSYTNDSTVRLSPIYKPENLSEPNTDNPPPFDISNTAVRSIAVKRRYEYYHITAIDFDTIDGNPRRYNSGYTPENLGIDYFIFTEFPAGKIPPYGLGTKYTHILSYIKISPRGNLSLPAERELSFAWTHTSVNFNNTISNTITTQIPAVKAKSLDPSSSVISGPGHTGGDLVSLRSSMQIMCYVPTAARYQIRMRCVAYSPNRSINLTLNIAGVTNYSLRALGIGSIKNIINPKYDDFQYIYFQTEDPQQVATVNLSSNFTMFLNSSDFADNTILIDKFEFIPITNTLEENLETQKLEKIQQTVNTLFTN

SEQ ID NO: 425 - protein, 362 aa, YBacillus thuringiensis 1518
MNKKSITHEEFIRQLKEYNLDNNLNYHDPAVLKKINELLPADQQYDLISPTQDWYQFKTLYPISKNGVIISSNLDDSSNVLVPELSENPYDPIPQSGKSTIQTAVRSPEALYIILTTNNSLSFGGGTNTMIATRIALLSVTRPELYQAITKVNYVYKSGQTAPRNAPVAYIELSPNNSYVQTLLNDSHMKRTSSYELVGSSIARRGIETKWSKSHTSGVSDTDSWSLAVSAGIDIEWDVGIPLTASAKEKLSLSITGTYGQSTTVSSQDTITQEYTFAKPGKDYKYDDYAYAVYQLKSNYQFIAGDAFNNLINSLSFGNQFSVHGDASYQYSTDTIFSTQTPDPTPTNEKSLIQVNFNPRFS

SEQ ID NO: 426 - protein, 663 aa, Bacillus thuringiensis Ywc2-8
MNSYQNKNEYEISDASRNNSNMSTRYPRYPLANNPQMPMRNTNYKEWLAMCADNKDNEQVPISPLDQEWRTVLPILFSAAASLTGLISLPTFGAISAGAAIAAALTSILFPSQGPDVFNELMGATENLLKREIETYVRGRAASELLALEDQRAYFKSAFDYWRLHPTDGNAIATVAARFHTVNGAFVTAMRLFRPAGYEALLLPVYAQAARLHLLHLRDGVLFANEWGLAKPDPGDLHDQEFNAKAAEYADYCELTYNTELNRIKTTSGKTWFDYNQYRRLMTFAVLDVVAKFSILNPRIYSLALQGEILTRKIYTDPVNFSPGSSIADDENRYTVPPSHVRQLVNSRLFTNVASVQNAGFIGNQNRYKNIGVSDLVDGPIIGQSVFEKVDADIPTNVSVFEVGVNGIQNDYPRNIGLKKTPSNAFTNNYAGSTNNLGPFTTVSLPPKDDKPLDHTNFSHRLSDIILPGNKGSSFAWTHVDVDPTGNYLSTTKINLIPATKASKLPLSFQLRKGPGFIGGDLVRLGNGVGISYKFNFQSSDSSANFRIRIRYAGAGSGASGGGQVYFKLGNYQSPDTSWGHTGFDSNNVKYNQFKVLELLGTAGNITANDLEIIVWTRDPGASDFYLDRLELIPMTGISTEYNEPQKLETAKKAVNDLFTNNL

SEQ ID NO: 427 - protein, 663 aa, Bacillus thuringiensis G7-1
MNSYQNKNEYEILDASRNNSNMSTRYPRYPLANNPQMPMRNTNYKEWLAMCADNKNNEQVPISPLDQEWRTVLPILFSAAASLTGLISLPTFGAISAGAAIAAALTSILFPSQGPDVFNELMGATENLLKREIETYVRGRAASELLALEDQRAYFKSAFDYWRLHPTDGNAIATVAARFHTVNGAFVTAMRLFRPAGYEALLLPVYAQAARLHLLHLRDGVLFANEWGLAKPDPGDLHDQEFNAKAAEYADYCELTYNTELNRIKTTSGKTWFDYNQYRRLMTFAVLDVVAKFSILNPRIYSLALQGEILTRKIYTDPVNFSPGSSIADDENRYTVPPSHVRQLVNSRLFTNVASVQNAGFIGNQNRYKNIGVSDLVDGPIIGQSVFEKVDADIPTNVSVFEVGVNGIQNDYPRNIGLKKTPSNAFTNNYAGSTNNLGPFTTVSLPPKDDKPLDHTNFSHRLSDIILPGNKGSSFAWTHVDVDPTGNYLSTTKINLIPATKASKLPLSFQLRKGPGFIGGDLVRLGNGVGISYKFNFQSSDSSANFRIRIRYAGAGSGASGGGQVYFKLGNYQSPDTSWGHTGFDSNNVKYNQFKVLELLGTAGNITANDLEIIVWTRDPGASDFYLDRLELIPMTGISTEYNEPQKLETAKKAVNDLFTNNL

SEQ ID NO: 428 - protein, 665 aa, Bacillus thuringiensis kim LBIT-980
MNSYQKKNDYEILNASPSYFNTLDSYPRYPLANDPQASMQTRNYKDWQNECEGITPSGFGAFSFIISIIIQFQSFLSEPSLSGGLGIGLDIADSLIADDVSQLSAREVRDLIQSGLTDLAISIASGSFNDIVEKYRDYLEVFKRWESGGRTDDDTRETIGRLIMDAERAAAELNQFSHGDYKIPLLPTYAQAANLHLKILRDILIHGEDLQIISTADRQFYRDKLFGGLKNYTNYCVDQYNAGLNQIKEAGTSAANWLRFHRFRREMTLSVLDLIALFPTYDIDSYDLPVNVELSRIIYTDPVGWTVEGMSTIYPWYSPYNRLAFNQLEAETIRGPYLSTWLDYIDIYSSQYSSLKVWSGNANTMKTIGGETRRQDGSAVGTPQRITVGNTDIFKVELTAGVHHFLIDYTNPNPLRSYGIINSKFFMTNGSTPTYTGSVGSMHTQTGKVAALPGVESEVPTANDYTHRLSDVINLTGGLPQHGSNSVRSSLVAHGWTHKSLKRENIIEANQISQIPAVKSYSMSGGLTVRHVSDHTGGDVVYFAQVGRVKILCKFTSPGYYKMRIRYASDYSATMTVNGIPVSLSSTTQVRSNLPYEAFQYAQVGPNHVFAVLTPKTLEFDIYGGVNGFMIDKIEFIPSNITTLEYEEERDLEKTKNAVNDLFIN

SEQ ID NO: 429 - protein, 1385 aa, Bacillus thuringiensis darmstadiensis PS17
MAILNELYPSVPYNVLAYTPPSFLPDAGTQATPADLTAYEQLLKNLEKGINAGTYSKAIADVLKGIFIDDTINYQTYVNIGLSLITLAVPEIGIFTPFIGLFFAALNKHDAPPPPNAKDIFEAMKPAIQEMIDRTLTADEQTFLNGEISGLQNLAARYQSTMDDIQSHGGFNKVDSGLIKKFTDEVLSLNSFYTDRLPVFITDNTADRTLLGLPYYAILASMHLMLLRDIITKGPTWDSKINFTPDAIDSFKTDIKNNIKLYSKTIYDVFQKGLASYGTPSDLESFAKKQKYIEIMTTHCLDFARLFPTFDPDLYPTGSGDISLQKTRRILSPFIPIRTADGLTLNNTSIDTSNWPNYENGNGAFPNPKERILKQFKLYPSWRAGQYGGLLQPYLWAIEVQDSVETRLYGQLPAVDPQAGPNYVSIDSSNPIIQINMDTWKTPPQGASGWNTNLMRGSVSGLSFLQRDGTRLSAGMGGGFADTIYSLPATHYLSYLYGTPYQTSDNYSGHVGALVGVSTPQEATLPNIIGQPDEQGNVSTMGFPFEKASYGGTVVKEWLNGANAMKLSPGQSIGIPITNVTSGEYQIRCRYASNDNTNVFFNVDTGGANPIFQQINFASTVDNNTGVQGANGVYVVKSIATTDNSFTEIPAKTINVHLTNQGSSDVFLDRIEFIPFSLPLIYHGSYNTSSGADDVLWSSSNMNYYDIIVNGQANSSSIASSMHLLNKGKVIKTIDIPGHSETFFATFPVPEGFNEVRILAGLPEVSGNITVQSNNPPQPSNNGGGDGGGNGGGDGGQYNFSLSGSDHTTIYHGKLETGIHVQGNYTYTGTPVLILNAYRNNTVVSSIPVYSPFDITIQTEADSLELELQPRYGFATVNGTATVKSPNVNYDRSFKLPIDLQNITTQVNALFASGTQNMLAHNVSDHDIEEVVLKVDALSDEVFGDEKKALRKLVNQAKRLSRARNLLIGGSFENWDAWYKGRNVVTVSDHELFKSDHVLLPPPGLSPSYIFQKVEESKLKPNTRYIVSGFIAHGKDLEIVVSRYGQEVQKVVQVPYGEAFPLTSNGPVCCPPRSTSNGTLGDPHFFSYSIDVGALDLQANPGIEFGLRIVNPTGMARVSNLEIREDRPLAANEIRQVQRVARNWRTEYEKERAEVTSLIQPVINRINGLYENGNWNGSIRSDISYQNIDAIVLPTLPKLRHWFMSDRFSEQGDIMAKFQGALNRAYAQLEQSTLLHNGHFTKDAANWTIEGDAHQITLEDGRRVLRLPDWSSSVSQMIEIENFNPDKEYNLVFHGQGEGTVTLEHGEETKYIETHTHHFANFTTSQRQGLTFESNKVTVTISSEDGEFLVDNIALVEAPLPTDDQNSEGNTASSTNSDTSMNNNQ

SEQ ID NO: 430 - protein, 1289 aa, Bacillus thuringiensis darmstadiensis PS17
MAILNELYPSVPYNVLAYTPPSFLPDAGTQATPADLTAYEQLLKNLEKGINAGTYSKAIADVLKGIFIDDTINYQTYVNIGLSLITLAVPEIGIFTPFIGLFFAALNKHDAPPPPNAKDIFEAMKPAIQEMIDRTLTADEQTFLNGEISGLQNLAARYQSTMDDIQSHGGFNKVDSGLIKKFTDEVLSLNSFYTDRLPVFITDNTADRTLLGLPYYAILASMHLMLLRDIITKGPTWDSKINFTPDAIDSFKTDIKNNIKLYSKTIYDVFQKGLASYGTPSDLESFAKKQKYIEIMTTHCLDFARLFPTFDPDLYPTGSGDISLQKTRRILSPFIPIRTADGLTLNNTSIDTSNWPNYENGNGAFPNPKERILKQFKLYPSWRAAQYGGLLQPYLWAIEVQDSVETRLYGQLPAVDPQAGPNYVSIDSSNPIIQINMDTWKTPPQGASGWNTNLMRGSVSGLSFLQRDGTRLSAGMGGGFADTIYSLPATHYLSYLYGTPYQTSDNYSGHVGALVGVSTPQEATLPNIIGQPDEQGNVSTMGFPFEKASYGGTVVKEWLNGANAMKLSPGQSIGIPITNVTSGEYQIRCRYASNDNTNVFFNVDTGGANPIFQQINFASTVDNNTGVQGANGVYVVKSIATTDNSFTVKIPAKTINVHLTNQGSSDVFLDRIEFVPILESNTVTIFNNSYTTGSANLIPAIAPLWSTSSDKALTGSMSITGRTTPNSDDALLRFFKTNYDTQTIPIPGSGKDFTNTLEIQDIVSIDIFVGSGLHGSDGSIKLDFTNNNSGSGGSPKSFTEQNDLENITTQVNALFTSNTQDALATDVSDHDIEEVVLKVDALSDEVFGKEKKTLRKFVNQAKRLSKARNLLVGGNFDNLDAWYRGRNVVNVSNHELLKSDHVLLPPPGLSPSYIFQKVEESKLKRNTRYTVSGFIAHATDLEIVVSRYGQEIKKVVQVPYGEAFPLTSSGPVCCIPHSTSNGTLGNPHFFSYSIDVGALDVDTNPGIEFGLRIVNPTGMARVSNLEIREDRPLAANEIRQVQRVARNWRTEYEKERAEVTSLIQPVINRINGLYDNGNWNGSIRSDISYQNIDAIVLPTLPKLRHWFMSDRFSEQGDIMAKFQGALNRAYAQLEQNTLLHNGHFTKDAANWTVEGDAHQVVLEDGKRVLRLPDWSSSVSQTIEIENFDPDKEYQLVFHGQGEGTVTLEHGEETKYIETHTHHFANFTTSQRQGLTFESNKVTVTISSEDGEFLVDNIALVEAPLPTDDQNSEGNTASSTNSDTSMNNNQ

SEQ ID NO: 431 - protein, 931 aa, Bacillus thuringiensis L366
MAILNELYPSVPYNVLAYTPPSFLPDAGTQATPADLTAYEQLLKNLEKGINAGTYSKAIADVLKGIFIDDTINYQTYVNIGLSLITLAVPEIGIFTPFIGLFFAALNKHDAPPPPNAKDIFEAMKPAIQEMIDRTLTADEQTFLNGEISGLQNLAARYQSTMDDIQSHGGFNKVDSGLIKKFTDEVLSLNSFYTDRLPVFITDNTADRTLLGLPYYAILASMHLMLLRDIITKGPTWDSKINFTPDAIDSFKTDIKNNIKLYSKTIYDVFQKGLASYGTPSDLESFAKKQKYIEIMTTHCLDFARLFPTFDPDLYPTGSGDISLQKTRRILSPFIPIRTADGLTLNNTSIDTSNWPNYENGNGAFPNPKERISKQFKLYPSWRAGQYGGLLQPYLWAIEVQDSVETRLYGQLPAVDPQAGPNYVSIDSSNPIIQINMDTWKTPPQGASGWNTNLMRGSVSGLSFLQRDGTRLSAGMGGGFADTIYSLPATHYLSYLYGTPYQTSDNYSGHVGALVGVSTPQEATLPNIIGQPDEQGNVSTMGFPFEKASYGGTVVKEWLNGANAMKLSPGQSIGIPITNVTKQNYQVRCRYASNSDNPVFFNVDTGGANPIFQQINFESTVDSNMGVKGENGVYVVKSIATTDNSFTVKIPAKTINVHLTNQGSSDIFLDRIEFIPFKLTLSPTPITLDPMKTITASVLSATRASDGITTINDPVDGTLLSLPMGTSIDFSILNPTQTGTYQVSILYKSSSGGFTITKVTNDQNGQMVDYASTSELQYSNPIYVLSSNTGNTVLTIGPGGYSGPDLLIKEIRFTPATPNSSNKIDTDFQLVDGQGTVTIWKSDKIAYTLADIDIQISFNQTAWQSPNITPYLNDDPVGGIATFYNTTGESQHFTKDSLLFQRGFNNIRVNNGFGGATISGHMKANVIDNPS

SEQ ID NO: 432 - protein, 1245 aa, Bacillus thuringiensis PS86Q3
MATINELYPVPYNVLAHPIKEVDDPYSWSNLLKGIQEGWEEWGKTGQKKLFEDHLTIAWNLYKTGKLDYFALTKASISLIGFIPGAEAAVPFINMFVDFVWPKLFGANTEGKDQQLFNAIMDAVNKMVDNKFLSYNLSTLNKTIEGLQGNLGLFQNAIQVAICQGSTPERVNFDQNCTPCNPNQPCKDDLDRVASRFDTANSQFTQHLPEFKNPWSDENSTQEFKRTSVELTLPMYTTVATLHLLLYEGYIEFMTKWNFHNEQYLNNLKVELQQLIHSYSETVRTSFLQFLPTLNNRSKSSVNAYNRYVRNMTVNCLDIAATWPTFDTHNYHQGGKLDLTRIILSDTAGPIEEYTTGDKTSGPEHSNITPNNILDTPSPTYQHSFVSVDSIVYSRKELQQLDIATYSTNNSNNCHPYGLRLSYTDGSRYDYGDNQPDFTTSNNNYCHNSYTAPITLVNARHLYNAKGSLQNVESLVVSTVNGGSGSCICDAWINYLRPPQTSKNESRPDQKINVLYPITETVNKGTGGNLGVISAYVPMELVPENVIGDVNADTKLPLTQLKGFPFEKYGSEYNNRGISLVREWINGNNAVKLSNSQSVGIQITNQTKQKYEIRCRYASKGDNNVYFNVDLSENPFRNSISFGSTESSVVGVQGENGKYILKSITTVEIPAGSFYVHITNQGSSDLFLDRIEFVPKIQFQFCDNNNLHCDCNNPVDTDCTFCCVCTSLTDCDCNNPRGLDCTLCCQVENQLPSFVTLTDLQNITTQVNALVASSEHDTLATDVSDYEIEEVVLKVDALSGEVFGKEKKALRKLVNHTKRLSKARNLLIGGNFDNLDAWYRGRNVVNVSDHELFKSDHVLLPPPTLYSSYMFQKVEESKLKANTRYTVSGFIAHAEDLEIVVSRYGQEVKKVVQVPYGEAFPLTSRGAICCPPRSTSNGKPADPHFFSYSIDVGTLDVEANPGIELGLRIVERTGMARVSNLEIREDRPLKKNELRNVQRAARNWRTAYDQERAEVTALIQPVLNQINALYENEDWNGAIRSGVSYHDLEAIVLPTLPKLNHWFMSDMLGEQGSILAQFQEALDRAYTQLEESTILHNGHFTTDAANWTIEGDAHHAILEDGRRVLRLPDWSSSVSQTIEIENFDPDKEYQLVFHAQGEGTVSLQHGEEGEYVETHPHKSANFTTSHRQGVTFETNKVTVEITSEDGEFLVDHIALVEAPLPTDDQSSDGNTTSNTNSNTSMNNNQ

SEQ ID NO: 433 - protein, 1245 aa, YBacillus thuringiensis 1518
MATINELYPVPYNVLAHPIKEVDDPYSWSNLLKGIQEGWEEWGKTGQKKLFEDHLTIAWNLYKTGKLDYFALTKASISLIGFIPGAEAAVPFINMFVDFVWPKLFGANTEGKDQQLFNAIMDAVNKMVDNKFLSYNLSTLNKTIEGLQGNLGLFQNAIQVAICQGSTPERVIFDQNCTPCNPNQPCKDDLDRVASRFDTANSQFTQHLPEFKNPWSDENSTQEFKRTSVELTLPMYTTVATLHLLLYKGYIEFMTKWNFHNEQYLNNLKVELQQLIHSYSETVRTSFLQFLPTLNNRSKSSVNAYNRYVRNMTVNCLDIAATWPTFDTHNYHQGGKLDLTRIILSDTAGPIEEYTTGDKTSGPEHSNITPNNILDTPSPTYQHSFVSVDSIVYSRKELQQLDIATYSTNNSNNCHPYGLRLSYTDGSRYDYGDNQPDFTTSNNNYCHNSYTAPITLVNARHLYNAKGSLQNVESLVVSTVNGGSGSCICDAWINYLRPPQTSKNESRPDQKINVLYPITETVNKGTGGNLGVISAYVPMELVPENVIGDVNADTKLPLTQLKGFPFEKYGSEYNNRGISLVREWINGNNAVKLSNSQSVGIQITNQTKQKYEIRCRYASKGDNNVYFNVDLSENPFRNSISFGSTESSVVGVQGENGKYILKSITTVEIPAGSFYVHITNQGSSDLFLDRIEFVPKIQFQFCDNNNLHCDCNNPVDTDCTFCCVCTSLTDCDCNNPRGLDCTLCCQVENQLPSFVTLTDLQNITTQVNALVASSEHDTLATDVSDYEIEEVVLKVDALSGEVFGKEKKALRKLVNHTKRLSKARNLLIGGNFDNLDAWYRGRNVVNVSDHELFKSDHVLLPPPTLYSSYMFQKVEESKLKANTRYTVSGFIAHAEDLEIVVSRYGQEVKKVVQVPYGEAFPLTSRGAICCPPRSTCNGKPADPHFFSYSIDVGTLDVEANPGIELGLRIVERTGMARVSNLEIREDRPLKKNELRNVQRAARNWRTAYDQERAEVTALIQPVLNQINALYENEDWNRAIRSGVSYHDLEAIVLPTLPKLNHWFMSDMLGEQGSILAQFQEALDRAYTQLEESTILHNGHFTTDAANWTIEGDAHHAILEDGRRVLRLPDWSSSVSQTIEIENFDPDKEYQLVFHAQGEGTVSLQHGEEGEYVETHPHKSANFTTSHRQGVTFETNKVTVEITSEDGEFLVDHIALVEAPLPTDDQSSDGNTTSNTNSNTSMNNNQ

SEQ ID NO: 434 - protein, 1245 aa, Bacillus thuringiensis zjfc85
MATINELYPVPYNVLAHPIKEVDDPYSWSNLLKGIQEGWEEWGKTGQKKLFEDHLTIAWNLYKTGKLDYFALTKASISLIGFIPGAEAAVPFINMFVDFVWPKLFGANTEGKDQQLFNAIMDAVNKMVDNKFLRYNLSTLNKTIEGLQGNLGLFQNPIQVAICQGSTPERVIFDQNCTPCNPNQPCKDDLDRVASRFDTANSQFTQHLPEFKNPWSDENSTQEFKRTSVELTLPLYTTVATLHLLLYKGYIEFMTKWNFHNAQYLNNLKVELQQLIHSYSETVRTSFLQFLPTLNNRSKSSVNAYNGYVRNMTVNCLDIAATWPTFDTHNYHQGRKLDLTRIILSDTAGPIKEYTTGDKTSGPQHSNITPNNILDTPSPTYQHSFVSVDSIVYSRKELQQLDIATYSTNNSNNCHPYGLRLSYTDGSRYDYGDNQPDFTTSNNNYCHNSYTAPITLVNARHLYNAKGSLQNVESLVVSTVNGGSGSCICDAWINYLRPPQTSKNESRPDQKINVLYPITETVNKGTGGNLGVISAYVPMELVPENVIGDVNADTKLPLTQLKGFPFEKYGSEYNNRGISLVREWINGNNAVKLSNSQSVGIQITNQTKQKYEIRCRYASKGDNNVYFNVDLSENPFRNSISFGSTESSVVGVQGENGKYILKSITTVEIPAGSFYVHITNQGSSDLFLDRIEFVPKIQFQFCDNNNLHCDCNNPVDTDCTFCCVCTSLTDCDCNNPRGLDCTLCCQVENQLPSFVTLTDLQNITTQVNALVASSEHDTLATDVSDYEIEEVVLKVDALSGEVFGKEKKALRKLVNHTKRLSKARNLLIGGNFDNLDAWYRGRNVVNVSDHELFKSDHVLLPPPTLYSSYMFQKVEESKLKANTRYTVSGFIAHAEDLEIVVSRYGQEVKKVVQVPYGEAFPLTSRGAICCPPRSTCNGKPADPHFFSYSIDVGTLDVEANPGIELGLRIVERTGMARVSNLEIREDRPLKKNELRNVQRAARNWRTAYDQERAEVTALIQPVLNQINALYENEDWNRAIRSGVSYHDLEAIVLPTLPKLNHWFMSDMLGEQGSILAQFQEALDRAYTQLEESTILHNGHFTTDAANWTIEGDAHHAILEDGRRVLRLPDWSSSVSQTIEIENFDPDKEYQLVFHAQGEGTVSLQHGEEGEYVETHPHKSANFTTSHRQGVTFETNKVTVEITSEDGEFLVDHIALVEAPLPTDDQSSDGNTTSNTNSNTSMNNNQ

SEQ ID NO: 435 - protein, 1327 aa, Bacillus thuringiensis T13001
MATLNNMFSVPYNVLALPIIPNSILTFEDNRKKIEEGIKEFEKTGRIKPLKDLIELIFKGYSDDESSYAALVQTMLVVIPLAFPELAPVLPIIGVVINFVFPGLKGSAKSTYTMITEMVDKAINQSFTAQITNILTNNITGIQNNIQSVYDAMSNAIGTNDTIHNFIRNNDTTPCSQNNQPACPCPPNNQCLQKVVDEYTKAIANIDLIIPQFHDPLTGVISDLATANMYILPLYAQTVNLKLILRQSFIEFMEKYKYDEKETVFQAFINADIPEQIKKLRQDIITYTKDIYMQFEAHAPYPTYNSKKQLNDYIRYTRIIQVYCLDLVAMWPTLDRVNYALPVQQNMTRIIFGDLIGPVETVPQVPRQNSDNFHFNLSDVYRNPLPNNDIFNYRYGGLQISKAQFMTYYKKFGAFSTHDEYYYVDGHRLSFNTSDKKTIEINAHQNSHDTIEKDVIDQLGGYVTRMNMVSQEIGSGSILGGNAIDRTALTTSTGDKDILAAGFNAINNGNYKTEGRGASHNQDVPNHKVQAIYPVQPNKYEYDDYGSEEKYGYLYTLIPMDVSFIPQLNAEDVITTIPAEQAVKINGQSVIDTVNTNSLLEFVNGANAIKLSPGETAQYTMINPVNRSYQVRVRVATEGETQLDIIAPVDSNTLNLSNTKTTANDQNGILGKQGNYIVFPQPNIDTVTGTSLPPTENIMNFPVGTFDFTIVNSGNSDTILDRIEFVPIVTSNKIQQDFTISPGTSQVIWTGNSANTIDITIIDNVDTSGLFVQIFQKGKQLHGELTLIDPAHIQRTFSEKFDQIVLYNPGYNSSISGTVSGSVSSIPKKFELSSDLQNITNQVNNLFASSEHDTLATDVSDYDIEEVILKVDALSDEVFGKEKKALRKLVNQAKRLSKARNLLLGGSFDNLDAWYRGRNVVTVSDHELFKSDHILLPLPTTLYPSYLFQKVEESKLKANTRYTVSGFIAHAEDLEIVVSRYGQEIKKVVQVPYGEAFPLTSSGPICCRPRSRVNGKPADPHFFSYSIDVGALDVEANPGIELGFRIVEPTGMARVSNLEIREDRPLTANEIRKVQRAARDWKQKYDQERAEVRALIQPVLNQINALYENEDWNGAIRSGVSYHDLEAIVLPTLPKLNHWFMSDMLGEQGSILAQFQEALNRAYTQLEGSTILHNGHFTTDAANWTIEGDAHQVVLEDGRRVLRLPDWSSSLSQTIEIENFDPDKEYQLVFHGQGEGTVTLEHGEEGEYVETHPHKFANFTTSQRQGITFESNKVTVTISSEDGEFLADNIAIVEVPMFNKNQMVNENRGVNINSNTNMNSSNNSNNQ

SEQ ID NO: 436 - protein, 1179 aa, Bacillus thuringiensis T13001
MVTVNEIYPSYYNVLASPYVFESNTDSIEKAVDDFRKGLAKGDVTKQVVNIIESIKDGKFNYQTVITSILSLASMVLPEIGFFMPIIGLFFSALSGGGPSIDIGSIFKAIQPAIQQMIDKSLTEDNIKDMDTQATVLQTQLKAYQTQLKAYTSITNPGTTDISDLHRVLDNTIEQLNSNLAFFQKEGYKDIGLPYYCLFATLYFTLLSDKIKNGVKWGYNSQAIPSFQTTFDTDLASHTQYVLNTYFENMPKSDDPARDARDDGDDGDAKFENKKAKYIRGMTLSCLDYVSLWPTFSPRDYSQEVDVEQTRTIVASPNISYFAHNIAPPPYHSPLSRIKIYNIVDPLYYGLPIIGAEKWDQSGGYETEGKLNGVQTPSVTFPQNDPVIQTLPCVAGPAESIIGVIGGYTFNLKSGNQLSLLPDHVLPMPCSLVGGLVGDEEDVKFPDNHKLNYMIDAKTSGYSVTVFENLVPENIIGQPVDTDNGNTVLQIKGFPAEKGRIGNPDQGELHYVYEPGNGAAAIDLKPYQILELPFYNYTNGDYHVRIRYASKSDIPAYFSVNTPNGSQARGPITLPNTETQASAVPGMSGKYAFNEGATVTIPVVKDKDYCTVNIQNNSQEALFIDRIEFVPKTNLCDNLHCDCNNPVDTDCQMCCICASLTDCDCNNPHGFDCAICCSLGISHPSFVTLTDLQNITTQVNALFASETKNMLAKEVNDHDIEEVVLKVDALSDEVFGTEKKALRKLVNQAKRLSKARNLLVGGSFENWDAWYKGQKVIRLSDHELLKGDHVFLPSPTLYPSYIFQKVEESKLKPNTRYTVSGFIAHAIGLEIVVSRYGQEIKKVVQVPYGEAFPLTPIGRICCQSYSTSNGKPVDPHFFSYSIDVGALDVEANPGIEFGLRIVERTGMARVSNLEIREDRSLTANELRIVQRAARDWKTTYDQERAEVTALIQPVLNQINGLYENGDWNGVIRSGISYHDVESIVLPTLPKLRHWFISDMLSAQGNIIARFQEVLNFAHRQLEENTLLHNGHFTTDAANWTVEGDAHQRTLEDGRRVLRFPDWSSSVSQTIEIENFDPNKEYQLVFHGQGEGTVTLEHGEETKYIETHTHHFANFTTSQRQGLTFESNKVTVTISSEDGEFLVDNIALVEVPMFNKNQMVNENRGININSNTNMNSSNNQ

SEQ ID NO: 437 - protein, 869 aa, Bacillus thuringiensis T13001
MKNLEKGLTGQDATKAIANALQLIFIDDTVNYQSYVNFALSLITIAVPEIGILTPFIGLFFAALNKNSATPPSATDIFQAMQPAIQAMIDKSLETEELKHLNDAAAELRGALSAYQDEMDTIQGLGGFDKVDQATKDLFWGKLIDVDTFFRVKVPVFIQPNPQFPDLVLISAPYYTMFASMHLIFLRDIIYHGQTWNAKKFTQGVNGVSGSLDAYKIDLKKLIKTYSKNIHDIFNQGLQRYGDSFNDTVQFRKKQQYIEIMTTHCLDFARLFPTFDPDLYPIGSSGINLQKTRRLLSPILPIREFDVVSIDTSKWPDYNNGLLPDPNKRVLKKVTLYPYYGSRWDPNRNILWAVEIEDSFGTQLYGTIPPDSSSIDTGDKGGAHPIPIDPSNPVVDIYMYSFHTNGEATIQFTMKDGTQYKVGWVGSLQRYEIPGAHYLSYLYEVDYTKDDDPKYGYGRIGRLVGVSTPQEAMGENYIGIPDEDGNLSGMGFAWENGDIDNGIGSLQVVKETITGTNVVKLNYQQIVRLPIQNKTKLSYNVRIHYASKNEIKGFFHIYTGSDDLLKGEVTFPSTETDDVQKMVAVQGDNGKYALHVFETPVTLPVGQFTAYIQNNSTEDFYLDRIEFVPVTSDDNLPDITIPFHANLSIQPGESQTIWKSPGSRVGISTDFTTHVLSNFVGFAQYYKSGEPLDRSSMGDLSDHVQKSISTGFDEIRIMNAGEVGTASIVGTVSGSIDLSSNNNPGNNPNDTVTIDTSFDVSRGDTQIIWTAPQSKLGVSTKFQLDLGIYSTIELHYLKSGVIQQPIGVYSDDDQDNLIQDSVPTGFDQIEVYNSYDFYNHFDNAEGSLKGTISFASNSSRNTFVFLKNK

SEQ ID NO: 438 - protein, 303 aa, Bacillus thuringiensis jegathesan
MEITDIVLKIYDFIEWDYVTNQDGIPYTLFDKAIYEYELNDTVTIPETKVFKTTPIPIASALTITENRSSQTQLHTIKFSEKKMESVTNTTVHGFKIGGAIKVGAKGTVTANFLVSGGTAEANVELSLTGEYNYSSTTANVNQTEKTWEITENVSVASHTSLTSQLIIMQADIRVPMILNSNLIGKRYYDDYANMFFSYIFQSKTSGRTEMISPASRLANQSWPGKPIVFKSGGSNGSLNLSGFGYSDLYKGLYAFIRYTETPLDRYSSPGKTWDSNLIHLRDGQILNVYDNRGIVKPVRLVE

SEQ ID NO: 439 - protein, 303 aa, Bacillus thuringiensis israelensis
MEITDIVLKIYDFIEWDYVTNQDGIPYTLFDKAIYEYELNDTVTIPETKVFQTTPIPIASALTITENRSSQTQLHTIKFSEKKMESVTNTTVHGFKIGGAIKVGAKGTVTANFLVSGGTAEANVELSLTGEYNYSSTTANVNQTEKTWEITENVSVASHTSLTSQLIIMQADIRVPMILNSNLIGKRYYDDYANMFFSYIFQSKTSGRTEMISPASRLANQSWPGKPIVFKSGGSNGSLNLSGFGYSDLYKGLYAFIRYTETPLDRYSSPGKTWDSNLIHLRDGQILNVYDNRGIVKPVRLVE

SEQ ID NO: 440 - protein, 303 aa, Bacillus thuringiensis IBL 4222; identical to SEQ ID NO: 439

SEQ ID NO: 441 - protein, 319 aa, Bacillus thuringiensis malayensis
MTITNIELAIRDYTNWDGTREIPGYINRQVIDGPNIYDYVISDSVAVPKTVIFNVNPTPYTGPNIISENNTDVNQNKRIKFSEKVVETTTHTTTKGFKIGGGIKSTTKGTLKLKFPVGELGFEQTPELPPTGEYNSSSTTGNTCANEKLWEITDNITVPPHSRVTSTLIIMKTEVRVPMELTTNLRGTNSSGEGSFPTSNGLFSYTTSARGTVGGIFVSYYVRPASALYNTSWPDKPATFNSIGSNESLNLLGSGYSDVVPSLYVTIRQDQTPLSGYPGETKTWYSDKVILRDGRIVTLPSNADVNMSQTAKIPYCDRS

SEQ ID NO: 442 - protein, 319 aa, Bacillus thuringiensis israelensis
MTITNIELAIRDYTNWDGTREIPGYINRQVIDGPNIYDYVISDSVAVPKTVIFNVNPTPYTGPNIISENNTDVNQNKRIKFSEKVVETTTHTTTKGFKIGGGIKSTTKGTLKLKFPVGELGFEQTLELPLTGEYNSSSTTGNTCANEKLWEITDNITVPPHSRVTSTLIIMKTEVRVPMELTTNLRGTNSSGEGSFPTSNGLFSYTTSARGTVGGIFVSYYVRPASALYNTSWPDKPATFNSIGSNESLNLLGSGYSDVVPSLYVTIRQDQTPLSGYPGETKTWYSDKVILRDGRIVTLPSNADVNMSQTAKIPYCDRS

SEQ ID NO: 443 - protein, 319 aa, Bacillus thuringiensis IBL 4222; identical to SEQ ID NO: 442

SEQ ID NO: 444 - protein, 1154 aa, Bacillus thuringiensis serovar tochigiensis BGSC 4Y1
MKEQEFKGMDVLSNAQKTETLPCDLNITGCSPNNFLNISEEIDANLVPYNAPSAITTSIEITSTLLSDLGVPGASTIGLLLGKLINLLWPGGENDKSVWTSLLNESEELVNQKIEDITVITNAETALRGMHRVLQSYRSALNSWINPKGERISPEAMRTTYISALTTLNNSMASFSVPKHELPLLTLYSQAANIYLYVAKDITIFGKEWGFTYRNPEREGDIEFYYNEFLKYTAEHSEYCIDWYNQGLNQLSQSNSRDWVKYNKYRREMTIMVLDIISLFSSYDGFLYPQKTKTELTRMIFTNPIVYEGKQQYTWHQLAPSFSEIEDSAVPKPDYFRVLRNLLIHTKSYGSGVSATNYWSSHDLTYSLTNTPIYHQVSFGNKSTNGDDKYNNFSLSGRDVYKIISIARQNGPSYTDFIVNQFEMQTLNTSNAKNVLSYNHPSEWSNRQTFDSTTELPVTTNPPTTYGDDKQYSHRLGFISEVQHSSSRPNLIPIYGWTHTSVNLDNRIYSDRITQIPAIKSSPDLGGNFQNIAKGPGFNGGYVTTARSVNALVDVLKLQVTLDQNSLAQKYRVRLRYASNKRVPATLFTNTSGDYKFELQPSEVAPNPPYTKYQSFRYIDIPGLVSFTSTTDVVTVYLDMRYAPVGSYVEVDRIEFIPSNEIAELEKSLEKMKQAVNALFAEGRNVLKLDVTDRQIDMLSNLIDCLPEDVEPSEKRNLLNAVRYAKRLSQSRNLFIDSDFKLFNTGNGWSGSQSISISEGNILFKGPYLRLLGSNDDGSIPTYLYQKIDESKLKAYTRYKVRGFIGESKDLELYIVRYDGNTHTVMNVPRPRISPSIVMDSCGIPDRCKTHIEFDVSDTLSTDGSSSDPHAFSYHIDIGDMDLNENLGIWVIFKISTPDGYATLGNIECVEEGPLVGGALAQIKKKEQKFKEKIIEIRANTQRIYTEAKQAINNLFTDPPQDTKLKLATSLVKILEADGIAQRIPEIYNQWLYNIQGMNYSLFQELNTRIYQALELYTLRNLVQNPRFLDELSNWNVTSNVSVQQISGIPVLVLSNWDAQVKQRIVLKEDCGYILRVTAKKEGVGAGNVNISDCVGNAETLIFTSCNDKSTNISFNYDTQSIEFFPDAEQVYIEITESEGTFYIQNIELFLMRE

SEQ ID NO: 445 - protein, 753 aa, Bacillus thuringiensis MO19
MSVVYYVKGGDIMDPFSNCSEKKYSDSNNNQELTVESSSFYSNTTNENMKKNYPPINKNFSRNSNDTVLDILNISQNNNIDIFAPYNNLHSIKDELQIRTVIPGGVIFSVTGNKFVDSKFTAITYAAITKLTSSLITAAATAILGPIGTTIGGAISGPIANALFGLIPGMKPLTPQEIIDIAVEQSKLYTDEQITNLVITNATSELASIKAKIEDFNSQLNFALNSKNDNLMNRIDFETFLVTLENDIYGSIIKLMNFGYSKQLLPIITVCCTLNLSFLRDAIFNSQTFNISTQGKRVLTDTFERRTIEYSDKIINEYTLLFNEIKLKENAKTTLDFRTFMSLQVLDQVDLWSVFKFSQFNIRNTRRLYTIPYQYSENDVSKLDPTQINGDWKFINQILYGLPGNRISGFAGTVELYQPNKIRRINKLKALYSNNETTGYVGKDANAMDSFDTHPIISQKPAIINYASHVIVNLPPSSVQNLTLLDTIGPIFPGKYVINQQLYPGLNSLLEYEKFAIPDHKGVNVAGLPNIDSSYTSSTIDNLRQNFITSKPILGSVTAFQKDIPNYEQVNNKEQIVHLCPTDTDQKLLGFNIPALEYSKDRIANFGFEETWMIIPSYSSSGDNLQFKGTTAGIKYYLKSAQNAYANYKIFIKIAYKPNNSGNKVQLNINMKDLTSSSIISATLNIQNTSLLKGTSEDNVKFITFEVPTNFPISNNTYELQLIFTNLQQNDDLRLNELILHPINNDFINILNA

SEQ ID NO: 446 - protein, 305 aa, Bacillus thuringiensis tohokuensis
MAIFDVEADLIDNNKWYAQKYYNANPSTFRNPIVYDMNVSDLDVVPITTEFSSTPQLTNSATQVVRNNTSKDQSQTVLFSEKSIETFSRSTTEGYKIGSSIKSTTSFKVKVGFLVSGEINQSIEVAITGEYNHSSTETTTTTNEKLWQVTQPVIIPPYTQVTATLQIFSGPFVVPAKTKATIQGKGTNNGAYNFASAITYTDNSGRVYTDRNRAQALYTDRNEWPGYKRIYVGGSSSTDPTGLLRLEGEARITAQVGLYAVTEFRESPLPGYAGVGSNRTYYAPNILLGDGSVIQFPEYQRYLQR

SEQ ID NO: 447 - protein, 1060 aa, Bacillus thuringiensis serovar pakistani str. T13001
MADNNLQYTPPLRLDAEEYVPWKDVDSDVIIDAVAGAEGALFNLLIPGSGKIVEWGVSKFLKWATGDTYKPPSLSQEITRVEGMIATLQQQMYNVISATKAEILQNVAGLFFSNVVSAVNDYHHYLERWLDNSDDSNRLAELKSSLDKAIDEAHKAVSASYYNQNAQYTFAYNVNAATFSLILMRDKYLNYTQWGYGDAAGAQNFYEGTFLYRLKDYTTNILTQYNAILKLVHDLAVNPYSEPYREVTNRNPLQVTTNPLYNGKSDQRSMYWPSAYYGGSDNMRKKCISPMASDPYKHFSDSRIENQWNDDQHRSCQTPLPNGGLEMQINMPDQLKLSFQWNAYNRTRNVLTQTGLDFIAIWPYFDPIQYPPGEVTADLTRMLYSDLAGAITKNDIQSVDDIDNHVKKQSDLFEFLKSSKLYTKNVKVQTQQGPPFAYDSSTVKTHVDGDIIVGIENTTERTLETNTRNPGGIQGSSSDNADTIDPTEASKSVSISQWLFPRIFNFNGKVIGSVNETTPGNVTGIYNNLTYDFTLPEHQISWLSYVQAQENVLRPTNGYDYLTGNLTAANQGQIGALAIGWTKANIDANNTVKKGTITSIPAVKSHSITDWGTGTVVKGPGHTGGDLVKLPPNTRAKMIVTIEDTSTSYDVRIRYAAPSGGHIQFSYWNGGSDVKVADTQLQNTGGNTNFEHFQYAMLTTDNAKFKAPFSPVEILIENIGDSDVYLDKVEFSVLGQLPPGATPLTSQYMNPYGYNILWQSKNGEAANQGMVTFSQNDSAIKTFYLYNTEVVHQTTGSPSRWNGKFDTLYVQSPTSINLTQGFIVIDTTKNNPEPPIALPNQDILRPFTNEHEIWNGRYSTKALNLSLSTSSGAEGKIKFYNNTNLVHESPALSGSPSEPYTWEGSFNRITVYQSNSSDSNYFNLFGGFLKLDPNSNDNGNNGGPHNDCENIAHPDQPLYYESNNLIWTAAPNKLAYSTTEMQFVLSGGLGFTPGDIGAKIKLNFWKNDSIQYVAYGAVANLDFISAPAQSIPGGFDKITMDNDEYSFSTSLRMTLGSVCY

SEQ ID NO: 448 - protein, 781 aa, Bacillus thuringiensis serovar andalousiensis BGSC 4AW1
MKNGGLQMSRNDSNNDLPMSVLSRSQSKYLMTNMPLSELIHLSEQEWLDMYRKWKPMSTLDIDAEIGVTAALGIISFILSVSNPVSAAAVGIASILVPILWPTPAASPDPDIVWKSMIKNVENLIDEKIAQLHYDLAFAKLNGLKAGMVEFNQAIENLNQNPSSSGLKEAVRTKYRSLDSLFTYSMPQFAVNTAEIQLLPVYVEAATLHLLHKRTGFNFGKSWDLDPIEVESLYNDLIRLTGTYTDHCIRWYNRGLENLNPSTNTINYKPANMRDCNKYPWVKYDQSEWYYVNPSPNMCTTALSENSCKESMNVYNTEATPRWYGYRASQGEYQGLENWNSYNAFRRNLTTLVLDIIAVWPTFDPKLYKYGIKAELTRKLYSDICGTTYRSDPSQNSVNAIESKIVSPPSFFEWLDQIDFHTIVRDQGPNVGDFTSGELLTGVQQTVRRTLANPSLKPLEGKAGEQPTKIVRLTPNTFDITEVSTKQWFEPREIVLKRAGTNILTVGTITDERPYWSSLDRGLIYPKVKIYDQTQKNNQIPKTADPNKPQSEWDYSHRLSWFWYYPIREDAPMTYPNDKQIGAMACVWTHMSVDPTNSIAPDKITQIPAVKGNGMYFGGEIIKGLDNTGGDLVKLYSTSDRNQLQVDLKIPARMNNISGYQIRIRYASKQSGDIYLELERSVNSQWRLSTIPPTYSGNNLTSNSFGYHDALVIASQENAHPATLRIRNNDSPSLNTEIIIDKIEFIPIEGSLEEYEAKQKLEKAREVVNILFDSGANFEKA

SEQ ID NO: 449 - protein, 1078 aa, Bacillus thuringiensis serovar tochigiensis BGSC 4Y1
MSDKKGDKCMKQKRNAMKNKINAQSSPWFPANHKNKVEILQKGMNGVFDKKLGLNISPFPKVLTTCMQIVLKSIQFKSTLDIQIKEIFNCLWPMNADSQFIWQLCIAHLESLIQFDMPKSLKHNIFKRLQNIENEMKVYEKSFDEWQRTSNENVKKQELKKIIFNIESFLEECIRFFAMEKYELLLLVIYAQIANLHLLILRISLIYGEELDLTQEEQSVYQNKLISKIKLYTNYCTHQYKRGLFRIKKMQDYSCNSIEKWNLFNAYQKDMTLMVLDIISIWPTYDYSRYPMKTKIELTREIWTDIQYVSIENDKANLNKEVDFTLCTEPQIFEWLSTLEFYMRNSSNTSEFMGNIVGIHYSSYKTHHRKQHISRWWGEKSKYDYKLTVQNLQEYPVYNSIAQNSYESNQKVIKYIEKESQLLYHRLSRISGVIECPDKTNVSAITFAWAHVSVQETHDIDNKKLIIQIPASKAWSDETGKLRVIDGISTGGPLVLLEDTPLTISLNSKILHHLRIRYACNNNGVLRISKKPKLGSLSECIAEQAYKTTYEGSERDLVFESFDYLDFDFLLGETTSPYLIILERIQGTSPLIIDKIECIPVCITKRQHENNQYIKEAQKAVNQLFTNSLKNKLKFETTDYNVDQTAKKVESIYDSISLKEKVSLLRDVKHAKRLSKYRNLISNEDFGLPELISKNSWQFTHHVRVSCSDPQFKGYFLEIPSVKNVSLNEKDLFRNVYQKIDESKLKPYTRYIVRGFIGHCEDLEIWVTRYEKEVMSLQNVNNIVNNNGSVSHDTSHYFKVHIDVGNLDIEENLGIWVAFQITSPNGSATLGNIELIEMMPLSGKLLTQIKNTEEEWKKEKERRQLESNKSIQIANKAVKGLFDSSQEKKLNIVTSKKDILDALEKVENITYVYHSYLHNVVGNNFNVYKQLQERINRAFDLYQSRNKIMNGDFSRKDLGWNITPGIEFLKEEYRYFSLFIKHWSSSAVQEIELKSTCEYLLRVTGTKKAAGTGYVVCSGCASEYIQALFFTASEGERITKTIEVFPKTNRVQIEISTTNGTFLVESIELICLEDEKID

SEQ ID NO: 450 - protein, 475 aa, Bacillus thuringiensis PS52A1
MIIDSKTTLPRHSLIHTIKLNSNKKYGPGDMTNGNQFIISKQEWATIGAYIQTGLGLPVNEQQLRTHVNLSQDISIPSDFSQLYDVYCSDKTSAEWWNKNLYPLIIKSANDIASYGFKVAGDPSIKKDGYFKKLQDELDNIVDNNSDDDAIAKAIKDFKARCGILIKEAKQYEEAAKNIVTSLDQFLHGDQKKLEGVINIQKRLKEVQTALNQAHGESSPAHKELLEKVKNLKTTLERTIKAEQDLEKKVEYSFLLGPLLGFVVYEILENTAVQHIKNQIDEIKKQLDSAQHDLDRDVKIIGMLNSINTDIDNLYSQGQEAIKVFQKLQGIWATIGAQIENLRTTSLQEVQDSDDADEIQIELEDASDAWLVVAQEARDFTLNAYSTNSRQNLPINVISDSCNCSTTNMTSNQYSNPTTNMTSNQYMISHEYTSLPNNFMLSRNSNLEYKCPENNFMIYWYNNSDWYNNSDWYNN

SEQ ID NO: 451 - protein, 475 aa, Bacillus thuringiensis YBT-1518; identical to SEQ ID NO: 450

SEQ ID NO: 452 - protein, 475 aa, Bacillus thuringiensis 96418
MIIDSKTTLPRHSLIHTIKLNSNKKYGPGDMTNGNQFIISKQEWATIGAYIQTGLGLPVNEQQLRTHVNLSQDISIPSDFSQLYDVYCSDKTSAEWWNKNLYPLIIKSANDIASYGFKVAGDPSIKKDGYFKKLQDELDNIVDNNSDDDAIAKAIKDFKARCGILIKEAKQYEEAAKNIVTSLDQFLHGDQKKLEGVINIQKRLKEVQTALNQAHGESSPAHKELLEKVKNLKTTLERTIKAEQDLEKKVEYSFLLGPLLGFVVYEILENTAVQHIKNQIDEIKKQLDSAQHDLDRDVKIIGMLNSINTDIDNLYSQGQEAIKVFQKLQGIWATIGAQIENLRTTSLQEVQDSDDADEIQIELEDASDAWLVVAQEARDFTLNAYSTNSRQNLPINVISDSCNCSTTNMTSNQYSNPTTNMTSNQYMISHEYTSLPNNFMLSRNSNLEYKCPESNFMIYWYNNSDWYNNSDWYNN

SEQ ID NO: 453 - protein, 395 aa, Bacillus thuringiensis PS69D1
MILGNGKTLPKHIRLAHIFATQNSSAKKDNPLGPEGMVTKDGFIISKEEWAFVQAYVTTGTGLPINDDEMRRHVGLPSRIQIPDDFNQLYKVYNEDKHLCSWWNGFLFPLVLKTANDISAYGFKCAGKGATKGYYEVMQDDVENISDNGYDKVAQEKAHKDLQARCKILIKEADQYKAAADDVSKHLNTFLKGGQDSDGNDVIGVEAVQVQLAQVKDNLDGLYGDKSPRHEELLKKVDDLKKELEAAIKAENELEKKVKMSFALGPLLGFVVYEILELTAVKSIHKKVEALQAELDTANDELDRDVKILGMMNSIDTDIDNMLEQGEQALVVFRKIAGIWSVISLNIGNLRETSLKEIEEENDDDALYIELGDAAGQWKEIAEEAQSFVLNAYTP

SEQ ID NO: 454 - protein, 808 aa, Bacillus thuringiensis MC28
MTKKHKKILSMTLATGVFAGTYIPTAYTAFAETEPKEDLNEKKTKNINQNNPSIDLKGWFENPYKGVTFDQFINAFNNNAWNPLLVDIKNNGNAGSGTLVFLKGMMGTGLSLLPPPASLLGSIWTIFMPSTNGGTDMWRQLETYIDEKIDSKINDYHKYLMGAEFNGAMSAIKEYQRVLQIYNDSKNSLKRVEAPGTGVITAARNADTALKAFISIIQTPEKETDSVYQQITAPIFVQAANAHLLLQRDMILYGEEWGMDKNQWQGYKDNQKKLIQEYTNYAMKVYNDGLEKKKKEAENINTQQPNRNTDKWNHINAYVREYTLSVLDFVDLFPATNPETYSKGIMQENSRQIYSSIKGAVIPQGGTGEGTTWENIQKILDSQEYKGDLHKLDIRSYDRIDAIQPWYSDKKNGGANWTTPGWTGNTNGGNLNPLINPLNNPITRVKAQSSRTPNYIDFKFDTGGNNPSFGRYVSGHASYKEDIFEYPNQKLSQVHAFNTSTYPGFQGIDAVVFGFVDKNLTQSSTYLMTNMITAIPAAKYNRGMSNFQPQVESIHAKQKAMKTDTTNSYLAYGVEVSKEQEYKIRYKVAANENSKISLSHRKPGGNYAKIDDTTIPITRNFADTVKGEYGSYKIVEGPTVKLTKGTHDLKLENSQGKFSVDQIELEPVEQDQVIAQDNFDDKRLSWVNLGGIVNGGVTGKAGMIDANGNTWSYIQDQVLPFSKYTLSIKVKLNSNNGNERQKVTLYTDNLKHERITKTVELKGNAGYQEIQLEFITRKDSANTHVGILTSNGASNILFDDVKVIGAKK

SEQ ID NO: 455 - protein, 815 aa, Bacillus cereus AH603
MGTGDFMTKKQKKILSITLATGVFAGTYIPTAYTAFAENEKKEDLQENQTKNINQNSLPIDSYGWFENPYKGVTFSQFIDAFNNNQWQPLLVNIKNKGDAGSGTISFLKGMMTTGLSLLPPPASLLASIWSVFIPTNDANGTDMWRQLEIYIDEKIDSKINDYHKYLMGAEFNGAMSAIKEYQRVLQIYNDSKNSLKRVEEPGTPVIEAVRAADRKLKEFIAVVQTPEKSNDSVYQQITAPIFVQAANAHLLLQRDMILYGEEWGMDKDQWQGYKDNQKKLIQEYTNYAMKVYNDGLEKRKKEAEEINTQQPNRNTDRWNHINDYVREYTLSVLDFVDLFPATNPETYSKGVMQENSRQIYSSIKGAVIPQGGTGEGTTWENIQKILDSQEYKGDLHKLDIRSFDRIDAIQPWFSDKQNGGSNWTTPGWTGNASGGALKNLINPSDNPITRVKAQSSRTPNYIDFKFDTGGDNPYFGRYFSGGSYKEDIFEYPNQKLSQIHAFNRSTYPGFEGIDAVVFGFVDKNLTQSSTYLMTNMITTIPAAKYNRGMSNFQPQVESIHAKQKAMKTDTTNSYLAYGVEISKEQEYKIRYKVAANENSKISLSHRKPGGNYAKIDDTTIPITGNAADTVKGEYGSYKIVEGPIVKLTKGAHDLKLENSQGKFSLDQIELEPVERDQVIARDNFDDQRLNWINLGGIVNGGITGKAGMIGTNGDTWTYIQDQVLPFSKYTLSIKVKLDSSDGNERQKVTIFTDNLKHERITKTVELKGKAGYQEMQLEFITSRDLANTHVGILTSNGTSNVLFDDVQVIGAKKS

SEQ ID NO: 456 - protein, 1138 aa, Bacillus thuringiensis galleriae PGSI245
MNLNNLDGYEDSNRTLNNSLNYPTQKALSPSLKNMNYQDFLSITEREQPEALASGNTAINTVVSVTGATLSALGVPGASFITNFYLKIAGLLWPENGKIWDEFMTEVEALIDQKIEEYVRNKAIAELDGLGSALDKYQKALADWLGKQDDPEAILSVATEFRIIDSLFEFSMPSFKVTGYEIPLLTVYAQAANLHLALLRDSTLYGDKWGFTQNNIEENYNRQKKRISEYSDHCTKWYNSGLSRLNGSTYEQWINYNRFRREMILMALDLVAVFPFHDPRRYSMETSTQLTREVYTDPVSLSISNPDIGPSFSQMENTAIRTPHLVDYLDELYIYTSKYKAFSHEIQPDLFYWSAHKVSFKKSEQSNLYTTGIYGKTSGYISSGAYSFHGNDIYRTLAAPSVVVYPYTQNYGVEQVEFYGVKGHVHYRGDNKYDLTYDSIDQLPPDGEPIHEKYTHRLCHATAIFKSTPDYDNATIPIFSWTHRSAEYYNRIYPNKITKIPAVKMYKLDDPSTVVKGPGFTGGDLVKRGSTGYIGDIKATVNSPLSQKYRVRVRYATNVSGQFNVYINDKITLQTKFQNTVETIGEGKDLTYGSFGYIEYSTTIQFPDEHPKITLHLSDLSNNSSFYVDSIEFIPVDVNYAEKEKLEKAQKAVNTLFTEGRNALQKDVTDYKVDQVSILVDCISGDLYPNEKRELQNLVKYAKRLSYSRNLLLDPTFDSINSSEENGWYGSNGIVIGNGDFVFKGNYLIFSGTNDTQYPTYLYQKIDESKLKEYTRYKLKGFIESSQDLEAYVIRYDAKHRTLDVSDNLLPDILPENTCGEPNRCAAQQYLDENPSPECSSMQDGILSDSHSFSLNIDTGSINHNENLGIWVLFKISTLEGYAKFGNLEVIEDGPVIGEALARVKRQETKWRNKLAQLTTETQAIYTRAKQALDNLFANAQDSHLKRDVTFAEIAAARKIVQSIREAYMSWLSVVPGVNHPIFTELSGRVQRAFQLYDVRNVVRNGRFLNGLSDWIVTSDVKVQEENGNNVLVLNNWDAQVLQNVKLYQDRGYILHVTARKIGIGEGYITITDEEGHTDQLRFTACEEIDASNAFISGYITKELEFFPDTEKVHIEIGETEGIFLVESIELFLMEELC

SEQ ID NO: 457 - protein, 1138 aa, Bacillus thuringiensis dakota HD511
MNLNNLGGYEDSNRTLNNSLNYPTQKALSPSLKNMNYQDFLSITEREQPEALASGNTAINTVVSVTGATLSALGVPGASFITNFYLKITGLLWPHNKNIWDEFMTEVETLIEQKIEQYARNKALAELEGLGNNLTIYQQALEDWLNNPDDPATITRVIDRFRILDALFESYMPSFRVAGYEIPLLTVYAQAANLHLALLRDSTLYGDKWGFTQNNIEENYNRQKKHISEYSNHCVKWYNSGLSRLNGSTYEQWINYNRFRREMILMVLDIAAVFPIYDPRMYSMETSTQLTREVYTDPISLSISNPDIGPSFSQMENTAFRTPHLVDYLDELYIYTSKYKAFSHEIQPDLFYWCVHKVSFKKSEQSNLYTTGIYGKTSGYISSGAYSFRGNDIYRTLAAPSVVVYPYTQNYGVEQVEFYGVKGHVHYRGDNKYDLTYDSIDQLPPDGEPIHEKYTHRLCHATAISKSTPDYDNATIPIFSWTHRSAEYYNRIYPNKIKKIPAVKMYKLDDLSTVVKGPGFTGGDLVKRGSNGYIGDIKATVNSPLSQKYRVRVRYATSVSGLFNVFINDEIALQKNFQSTVETIGEGKDLTYGSFGYIEYSTTIQFPNEHPKITLHLNHLSNNSPFYVDSIEFIPVDVNYDEKEKLEKAQKAVNTLFTEGRNALQKYVTDYKVDQVSILVDCISGDLYPNEKRELQNLVKYAKRLSYSRNLLLDPTFDSINSSEENGWYGSNGIVIGNGDFVFKGNYLIFSGTNDTQYPTYLYQKIDESKLKEYSRYKLKGFIESSQDLEAYVIRYDAKHRTLDVSDNLLPDILPENTCGEPNRCAAQQYLDENPSSECSSMQDGILSDSHSFSLNIDTGSINHNENLGIWVLFKISTLEGYAKFGNLEVIEDGPVIGEALARVKRQETKWRNKLAQMTTETQAIYTRAKQALDNLFANAQDSHLKIDVTFAEIAAARKIVQSIREVYMSWLSVVPGVNHPIFTELSGRVQRAFQLYDVRNVVRNGRFLNGLSDWIVTSDVNVQEENGNNVLVLNNWDAQVLRNVKLYQDRGYVLRVTARKIGIGEGYITITDEEGHTDQLRFTACEEIDASNAFISGYITKELEFFPDTEKVHIEIGETEGIFLVESIELFLMEELC

SEQ ID NO: 458 - protein, 1138 aa, Bacillus thuringiensis kumamotoensis 867
MNLNNLGGYEDSNRTLNNSLNYPTQKALSPSLKNMNYQDFLSITEREQPEALASGNTAINTVVSVTGATLSALGVPGASFITNFYLKITGLLWPHDKNIWDEFMTEVETLIEQKIEQYARNKALAELEGLGNNLTIYQQALEDWLNNPDDPATITRVIDRFRILDALFESYMPSFRVAGYEIPLLTVYAQAANLHLALLRDSTLYGDKWEFTQNNIEENYNRQKKHISEYSNHCVKWYNSGLSRLNGSTYEQWINYNRFRREMILMVLDIAAVFPIYDPRMYSMETSTQLTREVYTDPISLSISNPGIGPSFSQMENTAIRTPHLVDYLDELYIYTSKYKAFSHEIQPDLFYWSAHKVSFKQSEQSNLYTTGIYGKTSGYISSGAYSFRGNDIYRTLAAPSVVVYPYTQNYGVEQVEFYGVKGHVHYRGDNKYDLTYDSIDQLPPDGEPIHEKYTHRLCHATAISKSTPDYDNATIPIFSWTHRSAEYYNRIYPNKITKIPAVKMYKLGDTSTVVKGPGFTGGDLVKRGSNGYIGDIKATVNSPLSQNYRVRVRYATNVSGQFNVYINDKITLQRKFQNTVETIGEGKDLTYGSFGYIEYSTTIQFPDKHPKITLHLSDLSNNSSFYVDSIEFIPVDVNYDEKEKLEKAQKAVNTLFTEGRNALQKDVTDYKVDQVSILVDCISGDLYPNEKRELQNLVKYAKRLSYSRNLLLDPTFDSINSSEENGWYGSNGIVIGNGDFVFKGNYLIFSGTNDTQYPTYLYQKIDESKLKEYTRYKLKGFIESSQDLEAYVIRYDAKHRTLDVSDNLLPDILPENTCGEPNRCAAQQYLDENPSSECSSMQDGILSDSHSFSLNIDIGSINHNENLGIWVLFKISTLEGYAKFGNLEVIEDGPVIGEALARVKRQETKWRNKLAQLTTETQAIYTRAKQALDNLFANAQDSHLKIDVTFAEIAAARKIVQSIREAYMSWLSVVPGVNHPIFTELSERVQRAFQLYDVRNVVRNGRFLNGLSDWIVTSDVKVQEENGNNVLVLNNWDAQVLQNVKLYQDRGYILRVTARKIGIGEGYITITDEEGHTVQLRFTACEVIDASNAFISGYITKELEFFPDTEKVHIEIGETEGIFLVESIELFLMEELC

SEQ ID NO: 459 - protein, 1138 aa, Bacillus thuringiensis WZ-9
MNLNNLGGYEDSNRTLNNSLNYPTQKALSPSLKNMNYQDFLSITEREQPEALASGNTAINTVVSVTGATLSALGVPGASFITNFYLKITGLLWPHDKNIWDEFMTEVETLIEQKIEQYARNKALAELEGLGNNLTIYQQALEDWLNNPDDPATITRVIDRFRILDALFESYMPSFRVAGYEIPLLTVYAQAANLHLALLRDSTLYGDKWGFTQNNIEENYNRQKKHISEYSNHCVKWYNSGLSRLNGSTYEQWINYNRFRREMILMVLDIAAVFPIYDPRMYSMETSTQLTREVYTDPISLSISNPDIGPSFSQMENTAIRTPHLVDYLDELYIYTSKYKAFSHEIQPDLFYWSAHKVSFKQSEQSNLYTTGIYGKTSGYISSGAYSFRGNDIYRTLAAPSVVVYPYTQNYGVEQVEFYGVKGHVHYRGDNKYDLTYDSIDQLPPDGEPIHEKYTHRLCHATAISKSTPDYDNATIPIFSWTHRSAEYYNRIYPNKITKIPAVKMYKLGDTSTVVKGPGFTGGDLVKRGSNGYIGDIKATVNSPLSQNYRVRVRYATNVSGQFNVYINDKITLQRKFQNTVETIGEGKDLTYGSFGYMEYSTTIQFPDEHPKITLHLSDLSNNSSFYVDSIEFIPVDVNYDEKEKLEKAQKAVNTLFTEGRNALQKDVTDYKVDQVSILVDCISGDLYPNEKRELQNLVKYAKRLSYSRNLLLDPTFDSINSSEENGWYGSNGIVIGNGDFVFKGNYLIFSGTNDTQYPTYLYQKIDESKLKEYTRYKLKGFIESSQDLEAYVIRYDAKHRTLDVSDNLLPDILPENTCGEPNRCAAQQYLDENPSSECSSMQDGILSDSHSFSLNIDIGSINHNENLGIWVLFKISTLEGYAKFGNLEVIEDGPVIGEALARVKRQETKWRNKLAQLTTETQAIYTRAKQALDNLFANAQDSHLKIDVTFAEIAAARKIVQSIREAYMSWLSVVPGVNHPIFTELSERVQRAFQLYDVRNVVRNGRFLNGLSDWIVTSDVKVQEENGNNVLVLNNWDAQVLQNVKLYQDRGYILRVTARKIGIGEGYITITDEEGHTVQLRFTACEVIDASNAFISGYITKELEFFPDTEKVHIEIGETEGIFLVESIELFLMEELC

SEQ ID NO: 460 - protein, 1138 aa, Bacillus thuringiensis HQ122
MNLNNLDGYEDSNRTLNNSLNYPTQKALSPSLKNMNYQDFLSITEREQPEALASGNTAINTVVSVTGATLSALGVPGASFITNFYLKITGLLWPHDKNIWDEFMTEVETLIEQKIEQYARNKALAELEGLGNNLTIYQQALEDWLNNPDDPATITRVIDRFRILDALFESYMPSFRVAGYEIPLLTVYAQAANLHLALLRDSTLYGDKWGFTQNNIEENYNRQKKHISEYSNHCVKWYNSGLSRLHGSTYEQWINYNRFRREMILMVLDIAAVFPIYDPRMYSMETSTQLTREVYTDPISLSISNPDIGPSFSQMENTAIRTPHLVDYLDKLYIYTSKYKAFSHEIQPDLFYWSAHKVSFKQSEQSNLYTTGIYGKTSGYISSGEYSFRGNDIYRTLAAPSVVVYPYTQNYGVEQVEFYGVKGHVHYRGDNKYDLTYDSIDQLPPDGEPIHEKYTHRLCHATAISKSTPDYDNATIPIFSWTHRSAEYYNRIYPNKITKIPAVKMYKLDDLSTVVKGPGFTGGDLVKRGSNGYIGDIKATVNSPLSQKYRVRVRYATSVSGLFNVFINDEIALQRNFQSTVETIGEGKDLTYGSFGYIEYSTTIQFPNEHPKITLHLNHLSNNSPFYVDSIEFIPVDVNYDEKEKLEKAQKAVNTLFTEGRNALQKDVTDYKVDQVSILVDCISGDLYPNEKRELQNLVKYAKRLSYSRNLLLDPTFDSINSSEENGWYGSNGIVIGNGDFVFKGNYLIFSGTNDTQYPTYLYQKIDESKLKEYTRYKLKGFIESSQDLEAYVIRYDAKHRTLDVSDNLLPDILPENTCGEPNRCAAQQYLDENPSSECSSMQDGILSDSHSFSLNIDTGSTNHNENLGIWVLFKISTLEGYAKFGNLEVIEDGPVIGEALARVKRQETKWRNKLAQMTTETQAIYTRAKQALDNLFANAQDSHLKIDVTFAEIAAARKIVQSIREAYMSWLSVVPGVNHPIFTELSGRVQRAFQLYDVRNVVRNGRFLNGLSDWIVTSDVNVQEENGNNVLVLNNWDAQVLQNVKLYQDRGYILRVTARKIGIGEGYITITDEEGHTDQLRFTACEEIDASNAFISGYITKELEFFPDTEKVHIEIGETEGIFLVESIELFLMEELC

SEQ ID NO: 461 - protein, 1145 aa, Bacillus thuringiensis monterrey GM-33
MNLNNLGGYEDSNRTLNNSLNYPTQKALSPSLKNMNYQDFLSITEREQPEALASGNTAINTVVSVTGATLSALGVPGASFITNFYLKITGLLWPHDKNIWDEFMTEVETLIEQKIEQYARNKALAELEGLGNNLTIYQQALEDWLNNPDDPATIHDVIDRFRILDALFESYMPSFRVAGYEIPLLTVYAQAANLHLALLRDSTLYGDKWGFTQNNIEENYNRQKKHISEYSNHCVKWYNSGLSRLHGSTYEQWINYNRFRREMILMVLDIAAVFPIYDPRMYSMETSTQLTREVYTDPISLSISNPDIGPSFSQMENTAIRTPHLVDYLDKLYIYTSKYKAFSHEIQPDLFYWSAHKVSFKQSEQSNLYTTGIYGKTSGYISSGEYSFRGNDIYRTLAAPSVVVYPYTQNYGVEQVEFYGVKGHVHYRGDNKYDLTYDSIDQLPPDGESIHEKYTHRLCHATAISKSTPDYDNATIPIFSWTHRSAEYYNRIYPNKITKIPAVKMYKLDDLSTVVKGPGFTGGDLVKRGSNGYIGDIKATVNSPLSQKYRVRVRYATSVSGLFNVFINDEIALQRNFQSTVETIGEGKRFNLWFIWIYREYSTTIQYIRIEHPERITRSFKTHLSNNSPCYCRSIEFIPVDVNYAEKEKLEKAQKAVNALFTEGRNALQKHVTDYKVDQVSILVDCISGDLYPNEKRELQNLVKYAKRLSYSRNLLLDPTFDCINSSEENGWYGSNGIVIGNGDFVFKGNYLIFSGTNDTQYPTYLYQKIDESKLKEYTRYKLKGFIESSQDLEAYVIRYDAKHRTLDVSDNLLPDILPENTCGEPNRCAAQQYLDENPSSECSSMQDGILSDSHSSSLNIDTGSINHNENLGIWVWFKIPTLEGYAKFGNLEVDEDGPVIGEALARVKRQETKWRNKLAQMTTETQAIYTRAKQALEYLFANAQDSHLKRNVTFAEIAAARKIVQSIREAYMSWLSVVPGVNHPIFTELSGRVQRAFQLYDVRNVVRNGRFLNGLSDWIVTSDVKVQEENGNNVLVLNNWDAQVLQNVKLYQDRGYILHVTARKIGIGEGYITITDEEGHTDQLRFTACEEIDASNAFISGYITKELEFFPDTEKVHIEIGGTEGIFLVEGILEVFLRLESYVI

SEQ ID NO: 462 - protein, 1138 aa, Bacillus thuringiensis HQ122
MNLNNLGGYEDSNRTLNNSLNYPTQKALSPSLKNMNYQDFLSITEREQPEALASGNTAINTVVSVTGATLSALGVPGASFITNFYLKITGLLWPHNKNIWDEFMTEVETLIEQKIEQYARNKALAELEGLGNNLTIYQQALEDWLNNPDDPATITRVIDRFRILDALFESYMPSFRVAGYEIPLLTVYAQAANLHLALLRDSTLYGDKWGFTQNNIEENYNRQKKHISEYSNHCVKWYNSGLSRLNGSTYEQWINYNRFRREMILMVLDIAAVFPIYDPRMYSMETSTQLTREVYTDPISLSISNPDIGPSFSQMENTAIRTPHLVDYLDELYIYTSKYKAFSHEIQPDLFYWSAHKVSFKKSEQSNLYTTGIYGKTSGYISSGAYSFRGNDIYRTLAAPSVVVYPYTQNYGVEQVEFYGVKGHVHYRGDNKYDLTYDSIDQLPPDGEPIHEKYTHRLCHATAISKSTPDYDNATIPIFSWTHRSAEYYNRIYPNKITKIPAVKMYKLDDLSTVVKGPGFTGGDLVKRGSNGYIGDIKATVNSPLSQKYRVRVRYATSVFGLFNVFINDEIALQKNFQSTVETIGEGKDLTYGSFGYIEYSTTIQFPNEHPKITFHLNHLSNNSPFYVDSIEFIPVDVNYDEKEKLEKAQKAVNTLFTEGRNALQKYVTDYKVDQVSILVDCISGDLYPNEKRELQNLVKYAKRLSYSRNLLLDPTFDSINSSEENGWYGSNGIVIGNGDFVFKGNYLIFSGTNDTQYPTYLYQKIDESKLKEYTRYKLKGFIESSQDLEAYVIRYDAKHRTLDVSDNLLPDILPENTCGEPNRCAAQQYLDENPSSECSSMQDGILSDSHSFSLNIDTGSINHNENLGIWVLFKISTLEGYAKFGNLEVIEDGPVIGEALARVKRQETKWRNKLAQMTTETQAIYTRAKQALDNLFANAQDSHLKIDVTFAEIAAARKIVQSIREAYMSWLSVVPGVNHPIFTELSGRVQRAFQLYDVRNVVRNGRFLNGLSDWIVTSDVNVQEENGNNVLVLNNWDAQVLQNVKLYQDRGYILRVTARKIGIGEGYITITDEEGHTDQLRFTACEEIDASNAFISGYITKELEFFPDTEKVHIEIGETEGIFLVESIELFLMEELC

SEQ ID NO: 463 - protein, 1138 aa, Bacillus thuringiensis GW6; identical to SEQ ID NO: 459

SEQ ID NO: 464 - protein, 1138 aa, Bacillus thuringiensis; identical to SEQ ID NO: 459

SEQ ID NO: 465 - protein, 1138 aa, Bacillus thuringiensis QG-121
MNLNNLGGYEDSNRTLNNSLNYPTQKALSPSLKNMNYQDFLSITEREQPEALASGNTAINTVVSVTGATLSALGVPGASFITNFYLKITGLLWPHDKNIWHEFMTEVETLIEQKIEQYARNKALAELEGLGNNLTIYQQALEDWLNNPDDPATITRVIDRFRILDALFESYMPSFRVAGYEIPLLTVYAQAANLHLALLRDSTLYGDKWEFTQNNIEENYNRQKKHISEYSNHCVKWYNSGLSRLNGSTYEQWINYNRFRREMILMVLDIAAVFPIYDPRMYSMETSTQLTREVYTDPISLSISNPGIGPSFSQMENTAIRTPHLVDYLDELYIYTSKYKAFSHEIQPDLFYWSAHKVSFKQSEQSNLYTTGIYGKTSGYISSGAYSFRGNDIYRTLAAPSVVVYPYTQNYGVEQVEFYGVKGHVHYRGDNKYDLTYDSIDQLPPDGESIHEKYTHRLCHATAISKSTPDYDNATIPIFSWTHRSAEYYNRIYPNKITKIPAVKMYKLGDTSTVVKGPGFTGGDLVKRGSNGYIGDIKATVNSPLSQNYRVRVRYATSVFGLFNVFINDEIALQKNFQSTVETIGEGKDLTYGSFGYIEYSTTIQFPNEHPKITFHLNHLSNNSPFYVDSIEFIPVDVNYDVNYAEKEKLEKAQKAVNALFTEGRNALQKHVTDYKVDQVSILVDCISGDLYPNEKRELQNLVKYAKRLSYSRNLLLDPTFDCINSSEENGWYGSNGIVIGNGDFVFKGNYLIFSGTNDTYLYQKIDESKLKEYTRYKLKGFIESSQDLEAYVIRYDAKHRTLDVSDNLLPDILPENTCGEPNRCAAQQYLDENPSSECSSMQDGILSDSHSFSLNIDTGSINHNENLGIWVLFKISTLEGYAKFGNLEVIEDGPVIGEALARVKRQETKWRNKLAQMTTETQAIYTRAKQALDNLFANAQDSHLKIDVTFAEIAAARKIVQSIREAYMSWLSVVPGVNHPIFTELSGRVQRAFQLYDVRNVVRNGRFLNGLSDWIVTSDVNVQEENGNNVLVLNNWDAQVLQNVKLYQDRGYILRVTARKIGIGEGYITITDEEGHTDQLRFTACEEIDASNAFISGYITKELEFFPDTEKVHIEIGETEGIFLVESIELFLMEELC

SEQ ID NO: 466 - protein, 1154 aa, Bacillus thuringiensis huazhongensis
MDIRNQNKYEVVYPAINETTSNTTSKYPLASDPIKQYQNMNYKDSLNIIEGNNVITPVSGTAVLATARKIGGKIVKAIGEQILSKILKEILDYLWPSSSSSNSWEEMMKEVEYLIDKKIEEYARNKALAVLEGIGNAVESYYSALEAWELESSERSLELVLERYQFAVQFARSSMPSFAIINYEIPLLATYANAANVHLLLMRDIQIYGDRWGISQNDMNLFLKEQEIYTSEYSEHCVKWYNEGLNQLKTKGGASGLVWENYNSFRTEMTIMVLDLVAIFPAYNMSKYPIESTVELTRTIYTDPLGYTGYSNDEHPTYYSSAKPFSSIESRAVLAPSLFKWITQLEVYTKKYSYSSQYTTLWTGLRVIAQPTKDFTDTVYDYGSSSGSENKDVFDLYGNDVYDTQSVVSSYKPTGGGHFGVPQFRLFWITKSNGLREQIFNYANNMGSYSAYRFSKDELPIELLQPPLFGDIEEYSHRLSHVSEVIKDYGEGIIPVLGWTHVSVTRDNRIYPDKITQLPAVKMYELLSSAVVVKGPGFTGGDLVKRTGNGGIGHFNVSVESPGTQRYRLRIRYSSEVSGVFHMQINDIETIQGEFSSTADSTSTLSSEAFQLREYSTTFTFPTNMTKIKVSLGAIEGAGGFYLDRIEFIPVDENHDNRVTLEKAQKAVNALFTAGRNALQTDVTDYKVDQVSILVDCVSGELYPNEKRELLSLVKYAKRLSYSRNLLLDPTFDSINSSDENGWYGSNGIAIGNGNFVFKGNYLIFSGTNDTQYPTYLYQKIDESKLKEYTRYKLRGFIENSQDLEAYVIRYDAKHETLDVSNNLLPDISPVNACGEPNRCAALQYLDENPRLECSSIQDGILSDSHSFSLNIDTGSIDFNENVGIWVLFKISTPEGYAKFGNLEVIEDSPVIGEALARVKRQETKWRNKLTQLRTETQAIYTRAKQAIDNVFTNAQDSHLKIGTTFAAIVAARKIVQSIREAYMSWLSIVPGVNYPIFTELNERVQRAFQLYDVRNVVRNGRFLNGVSDWIVTSDVKVQEENGNNVLVLSNWDAQVLQCLKLYQDRGYILRVTARKEGLGEGYITITDEEGHTDQLTFGTCEEIDASNTFVTTGYITKELEFFPDTEKVRIEIGETEGTFQVESIELFLMEDLC

SEQ ID NO: 467 - protein, 1144 aa, Bacillus thuringiensis BTH-13
MDKQNDSGIIKATLNEDFSNSIQRYPLVTDQTINYKDFLNMNEEIAPYASSKDVIFSSISIIRTFMGFAGHGTAGGIIGLFTEVLRLLWPNKQNDLWESFMNEVEALINQEITEAVVSKALSELEGLRNALEGYTSALEAWQNNRSDKLKQLLVYERFVSTENLFKFAMPSFRSVGFEGPLLTVYAQAANLHLFLLKNAELFGAEWGMQQYEIDLFYNEQKGYVEEYTDHCVKWYKEGLNKLKNASGVKGKVWENYNRFRREMTIMVLDLLPLFPIYDARTYPMETVTELTRQIFTDPIGLTGINETKYPDWYGAASSEFVLIENRAIPKPGLFQWLTKINVRARVVEPNDRFAIWTRHSVVTQCTKSTTENTFNYGTSSGSTLSHTFDLLSKDIYQTYSIAAANKSATWYQAVPLLRLYGINSSNVLSEDAFSFSNNIPSSKCKSTYSSDQLPIELLDEPIYGDLEEYGHRLSYVSEIFKETGSGTIPVLGWTHVSVRPDNKLYPDKITQIPAVKAFETNTAGVEIIDSASTGGPILKIVNNNLPSNQVFRMRLSFSEPQKIKVRVRYAATGDGVMSFSGIAHDEYFTATMKEGEALKYSYLTMGNDYAGTAAELSMLYIIKANTSNCTIYIDKIEFIPVDENYNNRVQLEKAQKAVNTLFTAGRNALQKDVTDFKVDQVSILVDCVSGELYPNEKRELLSLVKYAKRLSYSRNLLLDPTFDSINSSEENGWNGSNGIAIGSGDFVFKGNYLIFSGTNDEQYPTYLYQKIDESKLKEYTRYKLRGFIESSQDLEAYVIRYDAKHETLDVSNNLLPDIPPVNACGEPNRCAALQYLDENPKLECSSIQDGILSDSHSFSLHIDTGSIDFNENVGIWVLFKISTPEGYAKFGNLEVIEDGPVIGEALARVKRQETKWRNKLTQLRTETQAIYTRAKQALDNLFTDAQDSHLKIGATFAAIVAARKIVQSIREAYMSWLSDVPGLNYPIFTELNDRVQRAFQLYDVQNVVRNGRFLNGVLDWIVTSDVKVQEGNGNNVLVLSGWDAQVLQCLNLYQNRGYILRVTARKEGLGEGYITITDEEGNTDQLTFGSCENIDSSNSFVSTGYITKELEFFPDTDQIQIEIGETEGTFQVESVELFLMENLC

SEQ ID NO: 468 - protein, 1144 aa, Bacillus thuringiensis LH-2
MDQQNEYEIIQAGVSNAITDTFQRYPLANNPNTSFQNMNYKDYLNDPMFLGETRDAQTAITTSLEIISEILGFLGVPFVGPIIGFTNRLINLLWPRNTTDIWNAFMDEVQALINESITKAVRSKAISELEGIHQVYRLYIEALNEWKDTPDNPFVQERVRTTFRDVNSIINYAMPSFRVQGFEIPLLVVYAQAANLHLVLLRDATLFGAGWGFTETNINDRYNEQVRVTNGYIDHCTKWYNEGLTRLKNNWSKYHQFRREMTLMVLDLIALFPSHDARRYPMETSAQLTRDVYTDPIGYRGNANFSDPWTNHVSFSKAESETIRPPHLFDTLESVEINTAKAMLPLNDKSYMYYWAGHTVTSRLLDSSGNPLKYTYGSMTSEKNLVSLPGKDVYRINSVASGFSNYYAKLYGVSKVDFSIVDRNNSNKTTYSYSKSSTVPSDNKENRDSENELPQTTTDQPDYKGYSHRLSHITFISSAIPTYVWTRKSADLTNTIYPDKITQIPAVKMYELGSSAVVVKGPGFTGGDLVKRTNNGSLGRFKITIDSPGAHRYRLRVRYHSDVSGVFHMQINNVETIQGEFKSTVDSTSTMSNDSFQLREFTTTFRFPSNVTDIKVSLGAINGQGNFYLDRIEFAPVDTNYDERITLEKAQKAVNALFTEGRNALQTDMTDYKVDQVSILVDCVSGEVYPNEKRELLNLVKYAKRLSIARNLLVDPNFTSIHASMYSEDVKGWYGSNGIATGSGDVVLKENYVSLPSTSDAQYPTYLYQKIDESKLKAYTRYKLRGFIENSQDLEAYVVRYDAKHETLDVSNNLLPDVLPVNACGEPDRCAALQYLDENPRLECSSIQDGILSDSHSFSLNIDTGSMDLNENLGIWVLFKISTPEGYAKFGNLEVIEDGTVSGEALARVKRQETKWRNKLAQLRTETQAIYTRAKQALDNLFTDAQDSYLKIGATFAAIVAARKIVQSIREAYMSWLSVVPGVNYPIFTELNERVQRAFQLYDGRNVVRNGRFLNGVLDWIVTSDVSVQEENGNNVLVLSNWDAQVLQCLKLYQDRGYILRVTARKEGLGEGYITITDEEGNTDQLTFGSCEEIDTSNSFVSTGYMTKELEFFPDTEKVRIEIEETEGTFKVESVELFLMEDLC

SEQ ID NO: 469 - protein, 1157 aa, Bacillus thuringiensis serovar tochigiensis BGSC 4Y1
MDTRNQKKYEELQPALNDTFSNTAPKYPLACDPTKQCQNMNYKDYLNMTEGGAPYVSSRDVIFSSLAITRTFLGLAGLGTAGGMIGLFTEALRLLWPNKTEDLWKAFMDEVEKLINQKITDAVVSKALSELQGLANALEGFTNALEAWQNNRSDKLQQLLVYERFVATETLFKYAIPSFRVSGFEVPLLTVYAQAANLHLCLLKNAELFGADWGMPQYEIDVFYNEQKGYIEEYTDHCVTWYNSGLNQLKNVSGVKGKVWENYNRFRREMTIMVLDILPLFPIYDTRTYLMETTIELTRQIFTDPIGLTGINETKYPDWYEAASTEFILIENNAVPKPTLFQWLTKFNVWGRTVNPNDTFTIWTGHSVVTRYTKDSAEHTFNYGTSSGSTLSYTFDLLSKDVYQTYSLAETNKSATWYFAVPMLKLYSINNNNKLSEEYFSFPTNIPSSKGKRTYSSDQLPIELSDSPIYGDLEEYSHRLSYVSEIFKKTGSGTIPVLGWTHVSVSPDNRIFTDKITKLPVVKATQLSGEVITGPGFTGGNIIKSNVASTEPTKIIVLLNISPPSSKTKYSFRIRYAADAPGRLQITDGNYIAGLTQEFKATMEVGSSLKYNSFQYLTFSTGSLGTGSNYLKIYALQSPSSFSYNIYIDSIECIPVPVNYDDSVTLENAQKAVNALFTASSNALKREVTDYVVDQASILVDCVSEELYPNEKRELLHLVKYAKRLSAVRNLLLDPTFESINSSDVNGWYGSNGIAIGSGDFVFKGKYVSLPGTNDERYPTYLFQKIDESKLKEYTRYKLRGFVESSQDLEVYVIRYDAKHETLHVSDNLIPNVPPVNECGEPNRCAQQQYLSGNPTLEQYYVTKGVLYDSHAFSLDIDTGSVDPNEHLGIWVLFKISTTRGFAKLGNVEVIEDGLLTGEALARVKRKETKWKNKLEQLRAETQAISTRANQALDSLFADAQDSKLKLGVTFATIVAARKIVQSIRDVYMPWLSIVSGVNYSIFTELMGRVQLALQLYDLRNMVRNGRFLNGISDWGVTSDVKVQEEDGNLVLVLSNWDAQVLQCVKLYPDRGYILRVTARKEGLGEGYVTICGEEGNTDTLTFGTCDDTDRLQSVVSTGYVTKELEFFPDTENVQIEIGETEGVFQVESVELFLMEE

SEQ ID NO: 470 - protein, 1117 aa, Bacillus thuringiensis serovar tochigiensis BGSC 4Y1
MRVNRNELRTLPEGFASSTESAVTNTLNIISIILDATGHPVAGKVLGVITGILGILWPGGSEKAWEEFMEAVEQLVDEKITDAFKSEALSKLDGLSQLYNVYLSELELWIERPNDPSVIQSVRTRFLDLDSEFISSMPQFAINGFEIQFLPVYAHAANLHLLLLRDLSYYGKNWGLQEPEIENFYKRQMDNIQKYTDHCVEWYERGLQEVYNSFTSTNINEDGGLPWTHYNRYRREMTVYVLDLIATFPTNDWKKYHLETNVELSREIYTDPLGYEDDDTEDITDVDWYSEGVSFSEIENMHPPRLVEWLNKVYIYTDYFEAGSDESYAWVSHIITSSFTDSNEEHSRSYGSTESVEESEGISFYPAEIYKVVSVVGSERNATYDNYVNSANTFYGVTPTNELKTFTYSYRNDYDKKTLYSDDQLPLETDTPKYGEYSHRLSNITIAPLNSDDFGLVPILGWTHTSLKRENRIYPDKITQIPAVKSVEGGVVVKGPGFTGGNLIKAETTQGQIVKIVKFKVKVDGSLSQKYRVRVNYAANSDGRIDFYFAGQVVLQSDFIKTMDNNDISKFSSFGYLDIDFPFNFSHSELEVLSQISLKTTGVFYINNIEFIPEIEGYDEKVTLEKAQKAVNALFTAGRNAIQTDVTDYKVDQVSNLVDCVSEELYPNEKQELQNLVKYAKRLSISRNLLLDPNFTSINAPKVRGWHGSPGIIVGNGNYIFKGPYVHLQGTNDAQDPTYLYQKIDESKLKEYTRYKLRGFIESSQDLEVSVIRYDAKHETVDVSDNLLSDNLPKNACGEPNRCILQQYIENNPTLECSSIQDGILFDSHSFSLNIDTGSINYNENVGIWVVFKISTLEGYAKVGNIEVIEEAPLVGEALARVKRQETKWRNKLEQLRAETQVIYTRAKQAIDNLFTDIQDSKLKMEVTFATIVAAREIVQSIREAYMPWLSVVPGVNYPIFTELNVRVRRALQLYDLRNVVRNGRFRHGLSNWIVTSDVKIQEENGNNVLVLSGWDAQVLQHVKLYPDRGYILRVTAHKEGLGEGYITIMDEEGHTDQLTFGACEKIDASNTFMSTGYITKELEFFPDTEKVHIEIGETEGIFKVESIALFLMEEQC

SEQ ID NO: 471 - protein, 1157 aa, Bacillus thuringiensis kumamotoensis
MSPNNQNEYEIIDATPSTSVSSDSNRYPFANEPTDALQNMNYKDYLKMSGGENPELFGNPETFISSSTIQTGIGIVGRILGALGVPFASQIASFYSFIVGQLWPSKSVDIWGEIMERVEELVDQKIEKYVKDKALAELKGLGNALDVYQQSLEDWLENRNDARTRSVVSNQFIALDLNFVSSIPSFAVSGHEVLLLAVYAQAVNLHLLLLRDASIFGEEWGFTPGEISRFYNRQVQLTAEYSDYCVKWYKIGLDKLKGTTSKSWLNYHQFRREMTLLVLDLVALFPNYDTHMYPIETTAQLTRDVYTDPIAFNIVTSTGFCNPWSTHSGILFYEVENNVIRPPHLFDILSSVEINTSRGGITLNNDAYINYWSGHTLKYRRTADSTVTYTANYGRITSEKNSFALEDRDIFEINSTVANLANYYQKAYGVPGSWFHMVKRGTSSTTAYLYSKTHTALQGCTQVYESSDEIPLDRTVPVAESYSHRLSHITSHSFSKNGSAYYGSFPVFVWTHTSADLNNTIYSDKITQIPAVKGDMLYLGGSVVQGPGFTGGDILKRTNPSILGTFAVTVNGSLSQRYRVRIRYASTTDFEFTLYLGDTIEKNRFNKTMDNGASLTYETFKFASFITDFQFRETQDKILLSMGDFSSGQEVYIDRIEFIPVDETYEAEQDLEAAKKAVNALFTNTKDGLRPGVTDYEVNQAANLVECLSDDLYPNEKRLLFDAVREAKRLSGARNLLQDPDFQEINGENGWAASTGIEIVEGDAVFKGRYLRLPGAREIDTETYPTYLYQKVEEGVLKPYTRYRLRGFVGSSQGLEIYTIRHQTNRIVKNVPDDLLPDVSPVNSDGSINRCSEQKYVNSRLEGENRSGDAHEFSLPIDIGELDYNENAGIWVGFKITDPEGYATLGNLELVEEGPLSGDALERLQREEQQWKIQMTRRREETDRRYMASKQAVDRLYADYQDQQLNPDVEITDLTAAQDLIQSIPYVYNEMFPEIPGMNYTKFTELTDRLQQAWNLYDQRNAIPNGDFRNGLSNWNATPGVEVQQINHTSVLVIPNWDEQVSQQFTVQPNQRYVLRVTARKEGVGNGYVSIRDGGNQSETLTFSASDYDTNGVYNDQTGYITKTVTFIPYTDQMWIEISETEGTFYIESVELIVDVE

SEQ ID NO: 472 - protein, 1180 aa, Bacillus thuringiensis B-JJX
MSPNNQNEYEIIDATPSTSVSNDSNRYPSANEPTNALQNMNYKDYLRISEGYDSEYSGSPGAFISEKDAIKVGIDIVGNILGKLGVPFASQIVSFYNFILDQLWPSNSVSVWEQIMTLVEELVDQKITEYARNKALAELKGLGDALGVYQQSLEAWLENRNDTRARSVVSNQFIALELDFVGAIPSFAVSGQEVPLLAVYAQAVNMHLLLLRDASIFGEEWGFTSSEISTYYNRQVQLTSQYSDYCVKWYDTGLQKLKGTSAESWLEYHQFRREMTFMVLDLVALFPNYDTHTYPLETKAQLTREVYTDPIAFNLSGAAGFCRPWSKYTGISFSEIENAVIRPPHLFNVLRSLEINTVRGTILGNTKDYLNYWSGHSLQYNFIGNITVRESNYGYLTSEKTRIQLDTRDIFEINSTAASLANYYQETYGVPESRFHLVRWASPYDTSSHLYSKTHTTGEGCTQVYESSEEIPVDRTVPVNEGYGHRLSYVTALFFQKIINTFYRNGTLPVFVWTHRSADLTNTIYPDKITQIPAVKGDQLWDGTSVVAGPGFTGGDIIRKTYGNTGYEIINVSLEVPNPNQDYFIRIRYAATNDITLSVNLFPGFLTGNFQSTMNKGEPLTYGKFKYANFQSTKFNSSKQTIRLSVSGLTVPSGTEIYIDKIEFIPVDATYEAETDLEAAKKAVKALFSNTTDTLLPGVTDYEVNQAANLVECLSDDLYPNEKRLLFDAVREAKRLSEARNLLQDPDFQEINGENGWTASTGVEIIEGDAVFKGRYLRLPGAREMDTETYPTYVYQKIEEGVLKPYTRYRLRGFVGSSQGLEIYTIRHQTNRIVKNVPDDLLPDVTSVNAGGGINRCSEQKYVNSRLEGERGLPNGNRSAEAHEFSLPINIGELDYNENAGIWVGFKITDPEGYATLGNLGLVEEGPLSGDALERLQREEQQWKLQMTKRREETDRKYTAAKQAVDRLYADYQDQQLNPNVEITDITAAQDLIQSIPYVYNEIFPEIQGMNYAKFTELSNRLQRAWGLYDQRNAIPNGDFRNGLSNWNTTPGVEVQQINDTSVLVIPNWDEQVSQQFTVQPNQRYVLRVTARKEGVGNGYVSIRDGGNQTETLTFSASDYDTNSVYNTQASNTNGLYNEQTGYITKTVTFIPYTDQVWIEMSETEGTFYIESVELIVDVE

SEQ ID NO: 473 - protein, 1169 aa, Bacillus thuringiensis kumamotoensis
MSPNNQNEYEIIDATPSTSVSNDSNRYPFANEPTNALQNMDYKDYLKMSAGNVSEYPGSPEVFLSEQDAVKAAIDIVGKLLTGLGVPFVGPIVSLYTQLIDILWPSKQKSQWEIFMEQVEELINQKIAEYARNKALSELEGLGNNYQLYLTALEEWKENPNGSRALRDVRNRFEILDSLFTQYMPSFRVTNFEVPFLTVYTMAANLHLLLLRDASIFGEEWGLSTSTINNYYNRQMKLTAEYSDHCVKWYETGLAKLKGSSAKQWIDYNQFRREMTLTVLDVVALFSNYDTRTYPLATTAQLTREVYTDPLGAVDVPNIGSWYDKAPSFSEIEKAAIRPPHVFDYITGLTVYTKKRSFTSDRYMRYWAGHQISYKHIGTSSTFTQMYGTNQNLQSTSNFDFTNYDIYKTLSNGAVLLDIVYPGYTYTFFGMPETEFFMVNQLNNTRKTLTYKPASKDIIDRTRDSELELPPETSGQPNYESYSHRLGHITFIYSSSTSTYVPVFSWTHRSADLTNTVKSGEITQIPGGKSSTIGRNTYIIKGRGYTGGDLVALTDRIGSCEFQMIFPESQRFRIRIRYASNETSYISLYGLNQSGTLKFNQTYSNKNENDLTYNDFKYIEYPRVISVNASSNIQRLSIGIQTNTNLFILDRIEFIPVDETYEAETDLEAAKKAVNALFTNTKDGLQPGVTDYEVNQAANLVECLSDDLYPNEKRLLFDAVREAKRLSEARNLLQDPDFQEINGENGWTASTGIEVIEGDAVFKGRYLRLPGAREIDTETYPTYLYQKVEEGVLKPYTRYRLRGFVGSSQGLEIYTIRHQTNRIVKNVPDDLLPDVPPVNNDGRINRCSEQKYVNSRLEVENRSGEAHEFSIPIDTGELDYNENAGIWVGFKITDPEGYATLGNLELVEEGPLSGDALERLQKEEQQWKIQMTRRREETDRRYMASKQAVDRLYADYQDQQLNPNVEITDLTAAQDLIQSIPYVYNEMFPEIPGMNYTKFTELTDRLQQAWGLYDQRNAIPNGDYRNELSNWNTTSGVNVQQINHTSVLVIPNWNEQVSQKFTVQPNQRYVLRVTARKEGVGNGYVSIRDGGNQSETLTFSASDYDTNGMYDTQASNTNGYNTNSVYMIKPAISRKTVDISSVYNQMWIEISETEGTFYIESVELIVDVE

SEQ ID NO: 474 - protein, 1206 aa, Bacillus thuringiensis
MSPNNQNEYEIIDATPSTSVSNDSNRYPFANEPTNALQNMDYKDYLKMSAGNASEYPGSPEVLVSGQDAAKAAIDIVGKLLSGLGVPFVGPIVSLYTQLIDILWPSGEKSQWEIFMEQVEELINQKIAEYARNKALSELEGLGNNYQLYLTALEEWEENPNGSRALRDVRNRFEILDSLFTQYMPSFRVTNFEVPFLTVYAMAANLHLLLLKDASIFGEEWGWSTTTINNYYDRQMKLTAEYSDHCVKWYETGLAKLKGTSAKQWVDYNQFRREMTLAVLDVVALFPNYDTRTYPMETKAQLTREVYTDPLGAVNVSSIGSWYDKAPSFGVIESSVIRPPHVFDYITGLTVYTQSRSISSARYIRHWAGHQISYHRVSRGSNLQQMYGTNQNLHSTSTFDFTNYDIYKTLSKDAVLLDIVYPGYTYIFFGMPEVEFFMVNQLNNTRKTLKYNPVSKDIIASTRDSELELPPETSDQPNYESYSHRLCHITSIPATGNTTGLVPVFSWTHRSADLNNTIYSDKITQIPAVKCWDNLPFVPVVKGPGHTGGDLLQYNRSTGSVGTLFLARYGLALEKAGKYRVRLRYATDADIVLHVNDAQIQMPKTMNPGEDLTSKTFKVADAITTLNLATDSSLALKHNLGEDPNSTLSGIVYVDRIEFIPVDETYEAEQDLEAAKKAVNALFTNTKDGLRPGVTDYEVNQAANLVECLSDDLYPNEKRLLFDAVREAKRLSEARNLLQDPDFQEINGENGWTASTGIEVIEGDALFKGRYLRLPGAREIDTETYPTYLYQKVEEGVLKPYTRYRLRGFVGSSQGLEIFTIRHQTNRIVKNVPDDLLPDVSPVNSDGSINRCSEQKYVNSRLEVENRSGEAHEFSIPIDTGEIDYNENAGIWVGFKITDPEGYATLGNLELVEEGPLSGDALERLQREEQQWKIQMTRRREETDRRYMASKQAVDRLYADYQDQQLNPDVEITDLTAAQDLIQSIPYVYNEMFPEIPGMNYTKFTELTDRLQQAWSLYDQRNAIPNGDFRNGLSNWNATPGVEVQQINHTSVLVIPNWDEQVSQQFTVQPNQRYVLRVTARKEGVGNGYVSIRDGGNQTETLTFSASDYDTNGMYNTQVSNTNGYNTNNAYNTQASSTNGYNANNMYNTQASNTNGYNTNSVYNDQTGYITKTVTFIPYTDQMWIEMSETEGTFYIESVELIVDVE

SEQ ID NO: 475 - protein, 1210 aa, Bacillus thuringiensis
MSPNNQNEYEIIDATPSTSVSNDSNRYPFANEPTNALQNMDYKDYLKMSAGNASEYPGSPEVLVSGQDAAKAAIDIVGKLLSGLGVPFVGPIVSLYTQLIDILWPSGQKSQWEIFMEQVEELINQKIAEYARNKALSELEGLGNNYQLYLTALEEWKENPNGSRALRDVRNRFEILDSLFTQYMPSFRVTNFEVPFLTVYTQAANLHLLLLKDASIFGEEWGWSTTTINNYYDRQMKLTAEYSDHCVKWYETGLAKLKGTSAKQWVDYNQFRREMTLTVLDVVALFPNYDTRTYPMETKAQLTREVYTDPLGAVNVSSIGSWYDKAPSFGVIESSVIRPPHVFDYITGLTVYTQSRSISSARYIRHWAGHQISYHRIFSDNIIKQMYGTNQNLHSTSTFDFTNYDIYKTLSKDAVLLDIVFPGYTYIFFGMPEVEFFMVNQLNNTRKTLKYNPVSKDIIAGTRDSELELPPETSDQPNYESYSHRLCHITSIPATGSTTGLVPVFSWTHRSADLINAVHSDKITQIPVVKVSDLAPSITGGPNNTVVSGPGFTGGGIIKVIRNGVIISHMRVKISDINKEYSMRIRYASANNTEFYINPSEENVKSHAQKTMNRGEALTYNKFNYATLPPIKFTTTEPFITLGAIFEAEDFLGIEAYIDRIEFIPVDETYEAEQDLEAAKKAVNALFTNTKDGLRPGVTDYEVNQAANLVECLSDDLYPNEKRLLFDAVREAKRLSEARNLLQDPDFQEINGENGWTASTGIEVIEGDALFKGRYLRLPGAREIDTETYPTYLYQKVEEGVLKPYTRYRLRGFVGSSQGLEIFTIRHQTNRIVKNVPDDLLPDVSPVNSDGSINRCSEQKYVNSRLEVENRSGEAHEFSIPIDTGEIDYNENAGIWVGFKITDPEGYATLGNLELVEEGPLSGDALERLQREEQQWKIQMTRRREETDRRYMASKQAVDRLYADYQDQQLNPDVEITDLTAAQDLIQSIPYVYNEMFPEIPGMNYTKFTELTDRLQQAWSLYDQRNAIPNGDFRNGLSNWNATPGVEVQQINHTSVLVIPNWDEQVSQQFTVQPNQRYVLRVTARKEGVGNGYVSIRDGGNQTETLTFSASDYDTNGMYNTQVSNTNGYNTNNAYNTQASSTNGYNANNMYNTQASNTNGYNTNSVYNDQTGYITKTVTFIPYTDQMWIEMSETEGTFYIESVELIVDVE

SEQ ID NO: 476 - protein, 1160 aa, Bacillus thuringiensis japonensis Buibui
MSPNNQNEYEIIDALSPTSVSDNSIRYPLANDQTNTLQNMNYKDYLKMTESTNAELSRNPGTFISAQDAVGTGIDIVSTIISGLGIPVLGEVFSILGSLIGLLWPSNNENVWQIFMNRVEELIDQKILDSVRSRAIADLANSRIAVEYYQNALEDWRKNPHSTRSAALVKERFGNAEAILRTNMGSFSQTNYETPLLPTYAQAASLHLLVMRDVQIYGKEWGYPQNDIDLFYKEQVSYTARYSDHCVQWYNAGLNKLRGTGAKQWVDYNRFRREMNVMVLDLVALFPNYDARIYPLETNAELTREIFTDPVGSYVTGQSSTLISWYDMIPAALPSFSTLENLLRKPDFFTLLQEIRMYTSFRQNGTIEYYNYWGGQRLTLSYIYGSSFNKYSGVLAGAEDIIPVGQNDIYRVVWTYIGRYTNSLLGVNPVTFYFSNNTQKTYSKPKQFAGGIKTIDSGEELTYENYQSYSHRVSYITSFEIKSTGGTVLGVVPIFGWTHSSASRNNFIYATKISQIPINKASRTSGGAVWNFQEGLYNGGPVMKLSGSGSQVINLRVATDAKGASQRYRIRIRYASDRAGKFTISSRSPENPATYSASIAYTNTMSTNASLTYSTFAYAESGPINLGISGSSRTFDISITKEAGAANLYIDRIEFIPVNTLFEAEEDLDVAKKAVNGLFTNEKDALQTSVTDYQVNQAANLIECLSDELYPNEKRMLWDAVKEAKRLVQARNLLQDTGFNRINGENGWTGSTGIEVVEGDVLFKDRSLRLTSAREIDTETYPTYLYQQIDESLLKPYTRYKLKGFIGSSQDLEIKLIRHRANQIVKNVPDNLLPDVRPVNSCGGVDRCSEQQYVDANLALENNGENGNMSSDSHAFSFHIDTGEIDLNENTGIWIVFKIPTTNGNATLGNLEFVEEGPLSGETLEWAQQQEQQWQDKMARKRAASEKTYYAAKQAIDRLFADYQDQKLNSGVEMSDLLAAQNLVQSIPYVYNDALPEIPGMNYTSFTELTNRLQQAWNLYDLQNAIPNGDFRNGLSNWNATSDVNVQQLSDTSVLVIPNWNSQVSQQFTVQPNYRYVLRVTARKEGVGDGYVIIRDGANQTETLTFNICDDDTGVLSTDQTSYITKTVEFTPSTEQVWIDMSETEGVFNIESVELVLEEE

SEQ ID NO: 477 - protein, 1160 aa, Bacillus thuringiensis HBF-1
MSPNNQNEYEIIDALSPTSVSDNSIRYPLANDQTNTLQNMNYKDYLKMTESTNAELSRNPGTFISAQDAVGTGIDIVSTIISGLGIPVLGEVFSILGSLIGLLWPSNNENVWQIFMNRVEELIDQKILDSVRSRAIADLANSRIAVEYYQNALEDWRKNPHSTRSAALVKERFGNAEAILRTNMGSFSQTNYETPLLPTYAQAASLHLLVMRDVQIYGKEWGYPQNDIDLFYKEQVSYTARYSDHCVQWYNAGLNKLRGTGAKQWVDYNRFRREMNVMVLDLVALFPNYDARIYPLETNAELTREIFTDPVGSYVTGQSSTLISWYDMIPAALPSFSTLENLLRKPDFFTLLQEIRMYTSFRQNGTIEYYNYWGGQRLTLSYIYGSSFNKYSGVLAGAEDIIPVGQNDIYRVVWTYIGRYTNSLLGVNPVTFYFSNNTQKTYSKPKQFAGGIKTIDSGEELTYENYQSYSHRVSYITSFEIKSTGGTVLGVVPIFGWTHSSASRNNFIYATKISQIPINKASRTSGGAVWNFQEGLYNGGPVMKLSGSGSQVINLRVATDAKGASQRYRIRIRYASDRAGKFTISSRSPENPATYSASIAYTNTMSTNASLTYSTFAYAESGPINLGISGSSRTFDISITKEAGAANLYIDRIEFIPVNTLFEAEEDLDVAKKAVNGLFTNEKDALQTSVTDYQVNQAANLIECLSDELYPNEKRMLWDAVKEAKRLVQARNLLQDTGFNRINGENGWTGSTGIEVVEGDVLFKDRSLRLTNAREIDTETYPTYLYQQIDESLLKPYTRYKLKGFIGSSQDLEIKLIRHRANQIVKNVPDNLLPDVRPVNSCGGVDRCSEQQYVDANLALENNGENGNMSSDSHAFSFHIDTGEIDLNENTGIWIVFKIPTTNGNATLGNLEFVEEGPLSGETLEWAQQQEQQWQDKMARKRAASEKTYYAAKQAIDRLFADYQDQKLNSGVEMSDLLAAQNLVQSIPYVYNDALPEIPGMNYTSFTELTNRLQQAWNLYDLQNAIPNGDFRNGLSNWNATSDVNVQQLSDTSVLVIPNWNSQVSQQFTVQPNYRYVLRVTARKEGVGDGYVIIRDGANQTETLTFNICDDDTGVLSTDQTSYITKTVEFTPSTEQVWIDMSETEGVFNIESVELVLEEE

SEQ ID NO: 478 - protein, 1160 aa, Bacillus thuringiensis FTL-23
MSPNNQNEYEIIDALSPTSVSDNSIRYPLANDQTNTLQNMNYKDYLKMTESTNAELSRNPGTFISAQDAVGTGIDIVSTIISGLGIPVLGEVFSILGSLIGLLWPSNNENVWQIFMNRVEELIDQKILDSVRSRAIADLANSRIAVEYYQNALEDWRKNPHSTRSAALVKERFGNAEAILRTNMGSFSQTNYETPLLPTYAQAASLHLLVMRDVQIYGKEWGYPQNDIDLFYKEQVSYTARYSDHCVQWYNAGLNKLRGTGAKQWVDYNRFRREMNVMVLDLVALFPNYDARIYPLETNAELTREIFTDPVGSYVTGQSSTLISWYDMIPAALPSFSTLENLLRKPDFFTLLQEIRMYTSFRQNGTIEYYNYWGGQRLTLSYIYGSSFNKYSGVLAGAEDIIPVGQNDIYRVVWTYIGRYTNSLLGVNPVTFYFSNNTQKTYSKPKQFAGGIKTIDSGEELTYENYQSYSHRVSYITSFEIKSTGGTVLGVVPIFGWTHSSASRNNFIYATKISQIPINKASRTSGGAVWNFQEGLYNGGPVMKLPGSGSQVINLRVATDAKGASQRYRIRIRYASDRAGKFTISSRSPENPATYSASIAYTNTMSTNASLTYSTFAYAESGPINLGISGSSRTFDISITKEAGAANLYIDRIEFIPVNTLFEAEEDLDVAKKAVNGLFTNEKDALQTSVTDYQVNQAANLIECLSDELYPNEKRMLWDAVKEAKRLVQARNLLQDTGFNRINGENGWTGSTGIEVVEGDVLFKDRSLRLTSAREIDTETYPTYLYQQIDESLLKPYTRYKLKGFIGSSQDLEIKLIRHRANQVVKNVPDNLLPDVRPVNSCGGVDRCSEQQYVDANLALENNGENGNMSFDSHAFSFHIDTGEIDLNENTGIWIVFKIPTTNGNATLGNLEFVEEGPLSGETLEWAQQQEQQWQDKMARKRAASEKTYYAAKQAIDRLFADYQDQKLNSGVEMSDLLAAQNLVQSIPYVYNDALPEIPGMNYTSFTELTNRLQQAWNLYDLQNAIPNGDFRNGLSNWNATSDVNVQQLSDTSVLVIPNWNSQVSQQFTVQPNYRYVLRVTARKEGVGDGYVIIRDGANQTETLTFNICDDDTGVLSTDQTSYITKTVEFTPSTEQVWIDMSETEGVFNIESVELVLEEE

SEQ ID NO: 479 - protein, 1160 aa, Bacillus thuringiensis S185
MSPNNQNEYEIIDALSPTSVSDNSIRYPLANDQTNTLQNMNYKDYLKMTESTNAELSRNPGTFISAQDAVGTGIDIVSTIISGLGIPVLGEVFSILGSLIGLLWPSNNENVWQIFMNRVEELIDQKILDSVRSRAIADLANSRIAVEYYQNALEDWRKNPHSTRSAALVKERFGNAEAILRTNMGSFSQTNYETPLLPTYAQAASLHLLVMRDVQIYGKEWGYPQNDIDLFYKEQVSYTARYSDHCVQWYNAGLNKLRGTGAKQWVDYNRFRREMNVMVLDLVALFPNYDARIYPLETNAELTREIFTDPVGSYVTGQSSTLISWYDMIPAALPSFSTLENLLRKPDFFTLLQEIRMYTSFRQNGTIEYYNYWGGQRLTLSYIYGSSFNKYSGVLAGAEDIIPVGQNDIYRVVWTYIGRYTNSLLGVNPVTFYFSNNTQKTYSKPKQFAGGIKTIDSGEELTYENYQSYSHRVSYITSFEIKSTGGTVLGVVPIFGWTHSSASRNNFIYATKISQIPINKASRTSGGAVWNFQEGLYNGGPVMKLSGSGSQVINLRVATDAKGASQRYRIRIRYASDRAGKFTISSRSPENPATYSASIAYTNTMSTNASLTYSTFAYAESGPINLGISGSSRTFDISITKEAGAANLYIDRIEFIPVNTLFEAEEDLDVAKKAVNGLFTNEKDALQTSVTDYQVNQAANLIECLSDELYPNEKRMLWDAVKEAKRLVQARNLLQDTGFNRINGENGWTGSTGIEVVEGDVLFKDRSLRLTSAREIDTETYPTYLYQQIDESLLKPYTRYKLKGFIGSSQDLEIKLIRHRANQIVKNVPDNLLPDVRPVNSCGGVDRCSEQQYVDANLALENNGENGNMSSDSHAFSFHIDTGEIDLNENTGIWIVFKISTTNGNATLGNLEFVEEGPLSGETLEWAQQQEQQWQDKMARKRAASEKTYYAAKQAIDRLFADYQDQKLNSGVEMSDLLAAQNLVQSIPYVYNDALPEIPGMNYTSFTELTNRLQQAWNLYDLQNAIPNGDFRNGLSNWNATSDVNVQQLSDTSVLVIPNWNSQVSQQFTVQPNYRYVLRVTARKEGVGDGYVIIRDGANQTETLTFNICDDDTGVLSTDQTSYITKTVEFTPSTEQVWIDMSETEGVFNIESVELVLEEE

SEQ ID NO: 480 - protein, 1144 aa, Bacillus thuringiensis galleriae
MSPNNQNEYEILDASSSTSVSDNSVRYPLANDQTTTLQNMNYKDYLRMSEGENPELFGNPETFISSSTVQTGIGIVGQVLGALGVPFAGQIASFYSFIVGQLWPSSTVSVWEMIMKQVEDLIDQKITDSVRKTALAGLQGLGDGLDVYQKSLKNWLENRNDTRARSVVVTQYIALELDFVAKIPSFAISGQEVPLLSVYAQAANLHLLLLRDASIFGAEWGFTPGEISTFYDRQVTRTAQYSDYCVKWYNTGLDKLKGTNAASWLKYHQFRREMTLLVLDLVALFPNYDTRTYPIETTAQLTREVYTDPIVFNRETSGGFCRRWSLNSDISFSEVESAVIRSPHLFDILSEIEFYTTRAGLPLNNTEYLEYWVGHSIKYKNTNASSALERNYGTITSNKIKYYDLANKDIFQVRSLGADLANYYAQVYGVPYASFTLLDKNTGSGSVGGFTYSKPHTTMQVCTQNYNTIDEIPPENEPLSRGYSHRLSHITSYSFSKNASSPARYGNLPVFAWTHRSADVTNTVYSDKITQIPVVKAHTLVSGTTVIKGPGFTGGNILKRTSSGPLAYTSVSVKSPLSQRYRARIRYASTTNLRLFVTISGTRIYSINVNKTMNKGDDLTFNTFDLATIGTAFTFSNYSDSLTVGADSFASGGEVYVDKFELIPVNATFEAEEDLDVAKKAVKNLVECLSDELYPNEKRMLWDAVKEAKRLVQARNLLQDTGFNRINGENGWTGSTGIEVAEGDVLFKDRSLRLTSAREIDTETYPTYLYQQIDESLLKPYTRYKLKGFIGSSQDLEIKLIRHRANQIVKNVPDNLLPDVLPVNSCGGIDRCSEQQYVDANLALENNGENGNMSSDSHAFSFHIDTGEIDLNENTGIWVVFKIPTTNGYATLGNLELVEEGPLSGETLERAQQQEQQWQDKMARKRGASEKAYYAAKQAIDRLFADYQDQKLNSGVEMSDMLAAQNLVQSIPYVYNDALPEIPGMNYTSFTELTNRLQQAWNLYDLRNAIPNGDFRNGLSDWNATSDVNVQQLSDTSVLVIPNWNSQVSQQFTVQPNYRYVLRVTARKEGVGDGYVIIRDGANQTETLTFNICDDDTGVLSADQTSYITKTVEFTPSTEQVWIDMSETEGVFNIESVELVLEEE

SEQ ID NO: 481 - protein, 1167 aa, Bacillus thuringiensis
MSPNNQNEYEILDASSSTSVSDNSVRYPLANDQTTTLQNMNYKDYLRMSEGENPELFGNPETFISSSTVQTGIGIVGQVLGALGVPFAGQIASFYSFIVGQLWPSSTVSVWEMIMKQVEDLIDQKITDSVRKTALAGLQGLGDGLDVYQKSLKNWLENRNDTRARSVVVTQYIALELDFVAKIPSFAISGQEVPLLSVYAQAANLHLLLLRDASIFGAEWGFTPGEISTFYDRQVTRTAQYSDYCVKWYNTGLDKLKGTNAASWLKYHQFRREMTLLVLDLVALFPNYDTRTYPIETTAQLTREVYTDPIVFNRETSGGFCRRWSLNSDISFSEVESAVIRSPHLFDILSEIEFYTTRAGLPLNNTEYLEYWVGHSIKYKNTNASSALERNYGTITSNKIKYYDLANKDIFQVRSLGADLANYYAQVYGVPYASFTLLDKNTGSGSVGGFTYSKPHTTMQVCTQNYNTIDEIPPENEPLSRGYSHRLSHITSYSFSKNASSPARYGNLPVFAWTHRSADVTNTVYSDKITQIPVVKAHTLVSGTTVIKGPGFTGGNILKRTSSGPLAYTSVSVKSPLSQRYRARIRYASTTNLRLFVTISGTRIYSINVNKTMNKGDDLTFNTFDLATIGTAFTFSNYSDSLTVGADSFASGGEVYVDKFELIPVNATFEAEEDLDVAKKAVNGLFTSKKDALQTSVTDYQVNQAANLVECLSDELYPNEKRMLWDAVKEAKRLVQARNLLQDTGFNRINGENGWTGSTGIEVAEGDVLFKDRSLRLTSAREIDTETYPTYLYQQIDESLLKPYTRYKLKGFIGSSQDLEIKLIRHRANQIVKNVPDNLLPDVLPVNSCGGIDRCSEQQYVDANLALENNGENGNMSSDSHAFSFHIDTGEIDLNENTGIWVVFKIPTTNGYATLGNLELVEEGPLSGETLERAQQQEQQWQDKMARKRGASEKAYYAAKQAIDRLFADYQDQKLNSGVEMSDMLAAQNLVQSIPYVYNDALPEIPGMNYTSFTELTNRLQQAWNLYDLRNAIPNGDFRNGLSDWNATSDVNVQQLSDTSVLVIPNWNSQVSQQFTVQPNYRYVLRVTARKEGVGDGYVIIRDGANQTETLTFNICDDDTGVLSADQTSYITKTVEFTPSTEQVWIDMSETEGVFNIESVELVLEEE

SEQ ID NO: 482 - protein, 1174 aa, Bacillus thuringiensis BBT2-5
MSPNNQNEYEILDASSSTSVSDSSVRYPLANDQTTTLQNMNYKDCLRMSEGENPELFGNPETFISSSTVQTGIGIVGQVLGALGVPFAGQIASFYSFIVGQLWPSSTVSVWEMIMKQVEDLIDQKITDSVRKTALAGLQGLGDGLDVYQKSLKNWLENRNDTRARSVVVTQYIALELDFVAKIPSFAISGQEVPLLSVYAQAANLHLLLLRDASIFGAEWGFTPGEISTFYDRQVTRTAQYSDYCVKWYNTGLDKLKGTNAASWLKYHQFRREMTLLVLDLVALFPNYDTRTYPIETTAQLTREVYTDPIVFNRETSGGFCRRWSLNSDISFSEVESAVIRSPHLFDILSEIEFYTTRAGLPLNNTEYLEYWVGHSIKYKNTNASSALERNYGTITSNKIKYYDLANKDIFQVRSLGADLANYYAQVYGVPYASFTLLDKNTGSGSVGGFTYSKPHTTMQVCTQNYNTIDEIPPENEPLSRGYSHRLSHITSYSFSKIASSPARYGNLPVFAWTHRSADVTNTVYSDKITQIPVVKGIDLGSTSTIVNFEYNGGSIVKDTKSSTHNNSLSRIVSLMIKTEDPNPNSRSLYRIRVKYAADVPGTFRLHIQNTSPVTVPFTATMSGTNLQYSSFKYIEYIGYFNNREVGFSIESSTSQGRTRNVYIDKIEFIPVDATYIAEEDLEVAKKAVNGLFTNTKDALQTSVTDYQVNQAANLVECLSDELYPNEKRMLWDAVKEAKRLVQARNLLQDTGFNRINRENGWTGSTGIEIVEGDVLFKDRSLRLTSAREIDTETYPTYLYQQIDESLLKPYTRYKLKGFIGSSQDLEIKLIRHRANQIVKNVPDNLLPDVLPVNSCGGIDRCSEQQYVDANLALENNGENGNMSSDSHAFSFHIDTGEIDLNENTGIWVVFKIPTTNGYATLGNFELVEEGPLSGETLERAQQQEQQWQDKMARKRGASEKAYYAAKQAIDRLFADYQDQKLNSGVEMSDMLAAQNLVQSIPYVYNDALPEIPGMNYTSFTELTNRLQQAWNLYDLRNAIPNGDFRNGLSDWNATSDVNVQQLSDTSVLVIPNWNSQVSQQFTVQPNYRYVLRVTARKEGVGDGYVIIRDGANQTETLTFNICDDDTGVLSADQTSYITKTVEFTPSTEQVWIDMSETEGVFNIESVELVLEEE

SEQ ID NO: 483 - protein, 1164 aa, Bacillus thuringiensis 185
MSPNNQNEYEIIDMAPSTSVSNDSNRYPFASDPTNALQNMNYKEYLRMSEGYDSEYSGSPEVLISERDAVKTAISLVGTILGKLGVPLVGPIVSLYSTLIDVLWPGGKSQWEIFMEQVEALINQKIAEYARAKALAELEGLGNNYQLYLTALEEWQENPSSTRVLRDVRNRFEILDSLFTQYMPSFRVTGYEVPLLSVYAQAANLHLLLLKDASIFGEEWGFSTTAINNYYNRQMSLIAQYSDHCVQWYRTGLDRLKGSNAKQWVEYNRFRREMTLSVLDIMTLFPMYDMRTYPMETKAQLTREVYTDPIGAIGAQGSWYDSAPSFNTLESTFIRGKHLFDFITRLSIYTGRSSFSASNYLKKWIGHQISSQPIGGSIQTQTYGTTSGSSVIATQQIGFTGFDVYKTLSTAGVLFAYTSKYYGVSKVVFDAIYPDNKYKTTFTYNPGSEGIGAQEKDSEVELPPETLDQPNYEAYSHRLNYVTFIRNPDVPVFSWTHRSADRTNTVYSDKITQIPVVKASDGPKPSANEVGHYLGGDPISFNSSGSTGVIRLNINSPLSQKYRVRIRYCSSVDFDLDVVRGGTTVNNGRFNKSAPNVGWQSLKYENFKFASFSTPFTFNQAQDTLKISVRNFSSIVGGSVVYIDRIELIPVNATYEAEQDLDSAKKAVNTLFTNTKDGLRPGVTDYEVNQAANLVECLSDDLYPNEKRLLFDAVKEAKRLSEARNLLQDPDFQEINGENGWTASTGIEVVEGDALFKGRYLRLPGAREMDTETYPTYLYQKVEEGVLKPYTRYRLRGFVGSSQGLEISTIRHQTNRIVKNVPDDLLPDVPPVNSDGRINRCSEQKYVNSRLEGERGLPNGNRSAEAHEFSLPIDIGELDYNENAGIWVGFKITDPEGYATLGNLELVEEGPLSGDALERLQREEQQWKLQMTKRREETDRKYTAAKQAVDRLYADYQDQQLNPNVEITDITAAQNLIQSIPYVYNEMFPEIQGMNYTKYTELTNRLQQAWGLYDQRNAIPNGDFRNELSNWNTTSGVNVQQINNTSVLVMPNWDGQVSQQFTVQPNQRYVLRVTARKEGVGNGYVSIRDGGNQTETLTFSASDYNTDSVYNTQVSNTNGLYNEQTGYTTKTVTFIPYTDQVWIEMSETEGMFYIESVELIVDVE

SEQ ID NO: 484 - protein, 1164 aa, Bacillus thuringiensis B-DLL
MSPNNQNEYEIIDMAPSTSVSNDSNRYPFASDPTNALQNMNYKEYLRMSEGYDSEYSGSPEVLISERDAVKTAISLVGTILGKLGVPLVGPIVSLYSTLIDVLWPGGKSQWEIFMEQVEALINQKIAEYARAKALAELEGLGNNYQLYLTALEEWQENPSSTRVLRDVRNRFEILDSLFTQYMPSFRVTGYEVPLLSVYAQAANLHLLLLKDASIFGEEWGFSTTAINNYYNRQMSLIAQYSDHCVQWYRTGLDRLKGSNAKQWVEYNRFRREMTLSVLDIMTLFPMYDMRTYPMETKAQLTREVYTDPIGAIGAQGSWYDSAPSFNTLESTFIRGKHLFDFITRLSIYTGRSSFSASNYLKKWIGHQISSQPIGGSIQTQTYGTTSGSSVIATQQIGFTGFDVYKTLSTAGVLFAYTSKYYGVSKVVFDAIYPDNKYKTTFTYNPGSEGIAAQEKDSEVELPPETLDQPNYEAYSHRLNYVTFIRNPDVPVFSWTHRSADRTNTVYSDKITQIPVVKASDGPKPFVNEVGHYLGGEPISFISSGSTGVIRLNINSPLSQKYRVRIRYCSSVDFDLDVVRGGTTVNNGRFNKSAPNVGWQSLKYENFKFASFSTPFTFNQAQDTLKISVRNFSSIVGGSVVYIDRIELIPVNATYEAEQDLDSAKKAVNTLFTNTKDGLRPGVTDYEVNQAANLVECLSDDLYPNEKRLLFDAVKEAKRLSEARNLLQDPDFQEINGENGWTASTGIEVVERDALFKGRYLRLPGAREMDTETYPTYLYQKVEEGVLKPYTRYRLRGFVGSSQGLEISTIRHQTNRIVKNVPDDLLPDVPPVNSDGRINRCSEQKYVNSRLEGERGLPNGNRSAEAHEFSLPIDIGELDYNENAGIWVGFKITDPEGYATLGNLELIEEGPLSGDALERLQREEQQWKLQMTKRREETDRKYTAAKQAVDRLYADYQDQQLNPNVEITDITAAQHLIQSIPYVYNEMFPEIQGMNYTKYTELTNRLQQAWGLYDQRNAIPNGDFRNELSNWNTTSGVNVQQINNTSVLVMPNWDGQVSQQFTVQPNQRYVLRVTARKEGVGNGYVSIRDGGNQTETLTFSASDYNTDSVYNTQVSNTNGLYNEQTGYTTKTVTFIPYTDQVWIEMSETEGMFYIESVELIVDVE

SEQ ID NO: 485 - protein, 1174 aa, Bacillus thuringiensis 185
MSPNNQNEYEIIDMAPSTSVTNDSNRYPFANEPTNALQNMNYKDYLRMSEGYSPEYLTSLSPYSQFGTVDKIISIISLLNSAAGIPGLDFFTGLLQFILDFFAPEDPWAELMELVEQLIDQKITVATREKALAELRGLINGYLVYQQSLESWLENPNATRASIVREQYVALELDFVTSISSFAIAGQEVPLLAVYAQAANLHLLLLRDVSIFGEEWGLTVNEVNTFYIRQMTYTTEYSDYCVRIYNTGLNKLKGSSASSWVDYNRFRREMNLLVLDIIALFPNYDVRRYPMETTTELTRVVYTDPIVFDERKGVASTHSWTAIAPSFSSIESLTRRPGLFTWLDQLTIFSKRISQPSVFINSWAGHKISTFRTQKTDILINTTHGDTNNPIKEFVVDTKKVEDIYQTIAYPHAVANEVFYLFGVPKVDFNMVPAGGSANSAHTLIFSDSTGGRLESITKNSEAELPPTESLSDTPQPNQVTYSHRLDYATIIKANKSYGSGYIPLLGWTHRSVDRNNTIYPNKITQIPAVKAFSYTESFNVNVIAGPGFTGGDLISLGHLENIYMKLNVPNPQKFRVRIRYAASTTSYLQITGLSNLAQSDRFEQTYSNENENNLMFENFQYVELRNIFSVDAPLENHQVSIQNYQGNGFVIIDRIEFIPVNATYEAEQDLDSAKKAVNTLFTNTKDGLRPGVTDYEVNQAANLVECLSDDLYPNEKRLLFDAVKEAKRLSEARNLLQDPDFQEINGENGWTASTGIEVVEGDALFKGRYLRLPGAREMDTETYPTYLYQKVEEGVLKPYTRYRLRGFVGSSQGLEISTIRHQTNRIVKNVPDDLLPDVPPVNSDGRINRCSEQKYVNSRLEGERGLPNGNRSAEAHEFSLPIDIGELDYNENAGIWVGFKITDPEGYATLGNLELVEEGPLSGDALERLQREEQQWKLQMTKRREETDRKYTAAKQAVDRLYADYQDQQLNPNVEITDITAAQNLIQSIPYVYNEMFPEIQGMNYTKYTELTNRLQQAWGLYDQRNAIPNGDFRNELSNWNTTSGVNVQQINNTSVLVMPNWDGQVSQQFTVQPNQRYVLRVTARKEGVGNGYVSIRDGGNQTETLTFSASDYNTDSVYNTQVSNTNGLYNEQTGYTTKTVTFIPYTDQVWIEMSETEGMFYIESVELIVDVE

SEQ ID NO: 486 - protein, 1174 aa, Bacillus thuringiensis DLL
MSPNNQNEYEIIDMAPSTSVTNDSNRYPFANEPTNALQNMNYKDYLRMSEGYSPEYLTSLSPYSQFGTVDKIISIISLLNSAAGIPGLDFFTGLLQFILDFFAPEDPWAELMELVEQLIDQKITVATREKALAELRGLINGYLVYQQSLESWLENPNATRASIVREQYVALELDFVTSISSFAIAGQEVPLLAVYAQAANLHLLLLRDVSIFGEEWGLTVNEVNTFYIRQMTYTTEYSDYCVRIYNTGLNKLKGSSASSWVDYNRFRREMNLLVLDIIALFPNYDVRRYPMETTTELTRVVYTDPIVFDERKGVASTHSWTAIAPSFSSIESLTRRPGLFTWLDQLTIFSKRISQPSVFINSWAGHKISTFRTQKTDILINTTHGDTNNPIKEFVVDTKKVEDIYQTIAYPHAVANEVFYLFGVPKVDFNMVPAGGSANSAHTLIFSNSTGGRLESITKNSEAELPPTESLSDTPQPNQVTYSHRLDYATIIKANKSYGSGYIPLLGWTHRSVDRNNTIYPNKITQIPAVKAFSYTESFNVNVIAGPGFTGGDLISLGHLENIYMKLNVPNPQKFRVRIRYAASTTSYLQITGLSNLAQSDRFEQTYSNENENNLMFENFQYVELRNIFSVDAPLENHQVSIQNYQGNGFVIIDRIEFIPVNATYEAEQDLDSAKKAVNTLFTNTKDGLRPGVTDYEVNQAANLVECLSDDLYPNEKRLLFDAVKEAKRLSEARNLLQDPDFQEINGENGWTASTGIEVVEGDALFKGRYLRLPGAREMDTETYPTYLYQKVEEGVLKPYTRYRLRGFVGGSQGLEISTIRHQTNRIVKNVPDDLLPDVPPVNSDGRINRCSEQKYVNSRLEGERGLPNGNRSAEAHEFSLPIDIGELDYNENAGIWVGFKITDPEGYATLGNLELVEEGPLSGDALERLQREEQQWKLQMTKRREETDRKYTAAKQAVDRLYADYQDQQLNPNVEITDITAAQNLIQSIPYVYNEMFPEIQGMNYTKYTELTNRLQQAWGLYDQRNAIPNGDFRNELSNWNTTSGVNVQQINNTSVLVMPNWDGQVSQQFTVQPNQRYVLRVTARKEGVGNGYVSIRDGGNQTETLTFSASDYNTDSVYNTQVSNTNGLYNEQTGYTTKTVTFIPYTDQVWIEMSETEGMFYIESVELIVDVE

SEQ ID NO: 487 - protein, 1174 aa, Bacillus thuringiensis L-27
MSPNNQNEYEIIAYGTSTSVTNDSNRYPFANEPTNALQNMNYKDYLRMSEGYSPEYLTSLSPYSQFGTVDKIISIISLLNSAAGIPGLDFFTGLLQFILDFFAPEDPWAELMELVEQLIDQKITVATREKALAELRGLINGYLVYQQSLESWLENPNATRASIVREQYVALELDFVTSISSFAIAGQEVPLLAVYAQAANLHLLLLRDVSIFGEEWGLTVNEVNTFYIRQMTYTTEYSDYCVRIYNTGLNKLKGSSASSWVDYNRFRREMNLLVLDIIALFPNYDVRRYPMETTTELTRVVYTDPIVFDERKGVASTHSWTAIAPSFSSIESLTRRPGLFTWLDQLTIFSKRISQPSVFINSWAGHKISTFSTQKTDILINTTHGDTNNPIKEFVVDTKKVEDIYQTIAYPHAVANEVFYLFGVPKVDFNMVPAGGSANSAHTLIFSDSTGGRLESITKNSEAELPPTESLSDTPQPNQVTYSHRLDYATIIKANKSYGSGYIPLLGWTHRSVDRNNTIYPNKITQIPAVKAFSYTESFNVNVIAGPGFTGGDLISLGHLENIYMKLNVPNPQKFRVRIRYAASTTSYLQITGLSNLAQSDRFEQTYSNENENNLMFENFQYVELRNIFSVDAPLENHQVSIQNYQGNGFVIIDRIEFIPVNATYEAEQDLDSAKKAVNTLFTNTKDGLRPGVTDYEVNQAANLVECLSDDLYPNEKRLLFDAVKEAKRLSEARNLLQDPDFQEINGENGWTASTGIEVVEGDALFKGRYLRLPGAREMDTETYPTYLYQKVEEGVLKPYTRYRLRGFVGSSQGLEISTIRHQTNRIVKNVPDDLLPDVPPVNSDGRINRCSEQKYVNSRLEGERGLPNGNRSAEAHEFSLPIDIGELDYNENAGIWVGFKITDPEGYATLGNLELVEEGPLSGDALERLQREEQQWKLQMTKRREETDRKYTAAKQAVDRLYADYQDQQLNPNVEITDITAAQNLIQSIPYVYNEMFPEIQGMNYTKYTELTNRLQQAWGLYDQRNAIPNGDFRNELSNWNTTSGVNVQQINNTSVLVMPNWDGQVSQQFTVQPNQRYVLRVTARKEGVGNGYVSIRDGGNQTETLTFSASDYNTDSVYNTQVSNTNGLYNEQTGYTTKTVTFIPYTDQVWIEMSETEGMFYIESVELIVDVE

SEQ ID NO: 488 - protein, 1157 aa, Bacillus thuringiensis HBF-18
MSPNNQNEYEIIDASSPTSVSNNSVKYPLASDQTTTLQNMNYKDYLRMSEGENPELFGNPETFISAQDAVGTGIDIVSKLLGSLGVPLVGQAATALKWIIGKLWPSSGNPWDDLMTAVEELINQKIEAYARSKALAELGVSGRAVKSYQTALEEWQKNPNNARSAALVRERFSDAEHTLRTQMSLFTVRGYEIPLLATYAQAANLHLFVMKDIQIYGREWGYTQGDINLFYREQVEFTGEYSDYCVKWYNAGLDKLRGSTALQWINYNRFRREMTVMALDIVALFPNYDIRMYPMKTTAELTRRIYTDPLGYTGSGSNTPPWYNYGYSFSWIENNAVPAPGLFQWLQGIGIYTKFARITPFYANYWSGHTVFYKFTNDSTERRVQYGDTDTPELDSSSFENVDIYKVSASVGSYKSNTVLLPTFKATFEGVNQNNQLKTFRYQKESNVPSQTKNSTTELPVQLSTPPTYGDSEQYSHRLAYVFDAPIDSYTGIYRMYGFAPILGWTHISVSRDNRIDPDKITQIPAVKAYAEGLANYIKDPGFTGGDLLALGRNSNTSLIVNFSKPQTYRIRIRYAASKTSYFQLRGLHNIAQSQRFEATYSNKNENDLTFNDFKYVEIQKTVSIDNPSESRSISIYTQSDTELLIIDKIEFIPVDATFEAEQDLDVAKKAVNGLFTNTKDALQTSVTGYQGNQAGKLSRMPIDELYPNEKRMLWDAVKEAKRLVQARNLLQDTGFNVINGENGWTGSTGIEVVEGDVLFKDRSLRLPSAREIDTETYPTYLYQQIDESLLKPYTRYRLRGFIGSSQDLEIKLIRHRANQIVKNVPDNLLPDVRPVNSCGGVDRCSEQQYVDANLALENNGENRNMSSDSHAFSFHMDTGEIDLNENTGIWVVFKIPTTNGYATLGNLELVEEGPLSGDALERLQREEQQWKLQRTKRREETDRKYMAAKQAIDRLFADYQDQQLNSGVEMSDLLAAQNLVQSIPYVYNEMFPEIPGMNYTNFTELTNRLQQAWNLYDLRNAIPNGDFRNGLSDWNATSDINVQQLNDTSVLVIPNWNSQVSQQFTVQPNYRYVLRVTARKEGAGDGYVIIRDGTNQTETLAFNTCDNDAGVLSTNQASYITKTVEFTPSTEQVWIDMSETEGVFNIESVELVLEEE

SEQ ID NO: 489 - protein, 1157 aa, Bacillus thuringiensis 145
MSPNNQNEYEIIDASSPTSVSNNSVKYPLASDQTTTLQNMNYKDYLRMSEGENPELFGNPETFISAQDAVGTGIDIVSKLLGSLGVPLVGQAATALKWIIGKLWPSSGNPWDDLMTAVEELINQKIEAYARSKALAELGVSGRAVKSYQTALEEWQKNPNNARSAALVRERFSDAEHTLRTQMSLFTVRGYEIPLLATYAQAANLHLFVMKDIQIYGREWGYTQGDINLFYREQVEFTGEYSDYCVKWYNAGLDKLRGSTALQWINYNRFRREMTVMALDIVALFPNYDIRMYPMKTTAELTRRIYTDPLGYTGSGSNTPPWYNYGYSFSWIENNAMPAPGLFQWLQGIGIYTKFARITPFYANYWSGHTVFYKFTNDSTERRVQYGDTDTPELDSSSFENVDIYKVSASVGSYKSNTVLLPTFKATFEGVNQNNQLKTFRYQKESNVPSQTKNSTTELPVQLSTPPTYGDSEQYSHRLAYVFDAPIDSYTGIYRMYGFAPILGWTHISVSRDNRIDPDKITQIPAVKAYAEGLANYIKDPGFTGGDLLALGRNSNTSLIVNFSKPQTYRIRIRYAASKTSYFQLRGLHNIAQSQRFEATYSNKNENDLTFNDFKYVEIQKTVSIDNPSESRSISIYTQSDTELLIIDKIEFIPVDATFEAEQDLDVAKKAVNGLFTNTKDALQTSVTDYQVNQAANLVECLSDELYPNEKRMLWDAVKEAKRLVQARNLLQDTGFNVINGENGWTGSTGIEVVEGDVLFKDRSLRLPSAREIDTETYPTYLYQQIDESLLKPYTRYRLRGFIGSSQDLEIKLIRHRANQIVKNVPDNLLPDVRPVNSCGGVDRCSEQQYVDANLALENNGENRNMSSDSHAFSFHMDTGEIDLNENTGIWVVFKIPTTNGYATLGNLELVEEGPLSGDALERLQREEQQWKLQRTKRREETDRKYMAAKQAIDRLFADYQDQQLNSGVEMSDLLAAQNLVQSIPYVYNEMFPEIPGMNYTNFTELTNRLQQAWNLYDLRNAIPNGDFRNGLSDWNATSDINVQQLNDTSVLVIPNWNSQVSQQFTVQPNYRYVLRVTARKEGAGDGYVIIRDGTNQTETLAFNTCDNDAGVLSTNQASYITKTVEFTPSTEQVWIDMSETEGVFNIESVELVLEEE

SEQ ID NO: 490 - protein, 1157 aa, Bacillus thuringiensis FCD114; identical to SEQ ID NO: 489

SEQ ID NO: 491 - protein, 1199 aa, Bacillus thuringiensis 185
MSPNNQNEYEIIDTPSRTSVSNDSVRYPFASDPTTDLNNMNYKDFLKTVNGYNTGDLSGSEAFISQTAINTAGKAVGTVLGLLGVPLAGAVGPLISFYGAVALLFWGPGDPWQAFMTQVEALVNQKIADYARNKAIAELQGLRNILDLYRLALIEWEENPTRTRSLTNIRLKFEDVNQFFEYQMPSFAVGGYEVPLLAVYAQAANLHLSVLRDAAIFGEQWGMSQTAINNIYDLQQRRTAEYINHCVKWYNNGLDKLRGSNAGQWVNFNRYRREMTLMVLDIVAIFPNYDTRTYPSGIGTSVQLTREVYTDPIGATSTQGGVSWYDDAPSFTAIESSVVRPLHLFDLLTGVTVYAASSSWDSSHYFRFWNGHKVDTKGIKSSVQYSNVYGSTSNAVSTTIIPFSGFDVYRVFSLAGVLFAWTTRYFGAPEVYFQRVDHNSGIDVGYDIAFSERYAGIGEQQKDSLDELPLQTEGPAYRSYSHRLNHISMVPQTVRTRNVPVFSWSHRSADIDNRIFQDRINQIPVVKGHTLGPGASVMAGPGFTGGNIVTRTSPGVVVFSGVTIKNALSQRYRVRIRYASTTDFRFFSTLSGTRLYATQATKTMNKGQQLTYESFQYATIGSTFTFENVNDSLTIGADQFLSGEQVYVDRYEVIPVDATFEAENDLEVAKKAVNNLFTNAKDALQTDVTDYQVNQAANLVECLSSELYPNEKRLLFDAVKEAKRLDQARNLLQDTQFNEMNGENGWNGSTGVEIVEDDVFFKDRSIRLSSAREAGTENSPTYLYQKIDESRLKPYTRYSLRGFVRSSQNLEIYVTRYQTQRVVKNIVDNFLPDMYAVNACGGIDRCGEQKHVNTMLGLENNVPNGNTVSDSHEFSIPVDTGELNYNEDTGIWVVFKITTTDGYATLGNLELVEEGPLSGETLERVKNQGKQWQDQMARRRAETDTRYGTAKQAIDRLFVDYQDQQLSPSIEISDLTAAQNLVQSIPYVYNDTLPEIPGMNYTSVTELTNRLQQAWNLYDLRNSIQNGDFRNDVSNWNVTPGVNIQQMNHTSVLVIPNWDSQASQQITVQPNRRYVLRVTARKEGSGDGYVTIRDGAKYTETLTFNTCDYNGSSVYQEQALYTNDVYNTQSVNIQGSNSAYHTQATNTDRYNMNGMYNDQTSYVTKTVEFIPYTEQVWIEMSETEGVFYIESVELIVEEM

SEQ ID NO: 492 - protein, 1194 aa, Bacillus thuringiensis su4
MSPNNQNEFDIIDVPSNISVSNSFVRYPFANDPNRTLQNTNYKDFLTMSEKSNSGYLTDPEAFDDVGSAIFAGLSITAKIMDAFDVPGGDIFNGLLEIIGILWDLQDDTWEAFMEQVEVLIDQKIAEYARNLALTNLKGLENSYKLYLEALADWKQNPTSPSSQERVRTRFRDTDDSLTVFMPSFAVKGYEVPLLAVYAQAANLHLLLLRDSVAYGLGWGLSQLNVNDNYNRQVRLTGEYTNHCVSWYTTGLEKLRGSNAQSWIKFNRYRREMTVMVLDIVALFPNYDARRYPQATTTELTRLIYTDPHGYTIYSPTSQTTIPWYEYGQSFSEIENVAIQAPRLFRWAQEMQIYTKFVRHAPQESHYWSAHTFSFHHTRDNTKTTLTYGDTSDPISVGTADLSDLDIYKVSSLVASSWGSGVRLLVTKAKFEVIYTFNQLWEFNYEPPGISNFFNQWKNTDTELPIQIVDPPTFGDPNQYSHRVAYISHAPIQPYSGAFRNYGLVPVFGWSHVSVDRNNTLYADRITQIPAVKAVQLSGEPYPVVRGPGFTGGDIARLPNNPNVGLLFNSKVESPSENKRYRVRIRYACASGARAIFGGLYLPITVQFNQTMSTTTPTRYEDFQYVDVSGSFILGNTNVSFSLVPQSANQTNNLFIDKIEFIPENPALEAESDLEAAKKAVNALFTNSKDTLQIGVTDYQINQAANLIECVSDEVYPNEKRLLFDAVKEAKRLSTARNLLEDTDFHTINGGNGWTGSTGIEIVEGDILFKDRSLRLPSAREIERETYPTYIYQKIEESRLKPNTRYSLRGFIGSSQDLEIYVLRHQAYRVIKNVSDNLLPNMRPINACGGVDRCSQQKYVNNSLEVNSGLSNGIGAADSHEFSIHVDTGELNYNEDMGIGVVFKITTTDGYATVGNIELVEVETLSGEALERVQRQEKQWQGQLATRRKETETRYGPAKQAIDRLFVDFQDQQLSRSTEISDLTEAQNLVQSIPYVYNDMLPEIPGMNYTSVTELTNRLQQAWNLYDQRNSIQNGDFRNDVSNWNVTTEVNIQQMNDTSVLVIPNWDSQVSQQITVQPNRRYVLRVTARKEGNGDGYVTIRDGANHTETLTFNTCDYDGNSVYNNQPLNANNNVYTTKSSNTNSYHTNGVYHDQTSYVTKTMEFTPYTEQVWVEMSETEGVFYIDSVELIVEEM

SEQ ID NO: 493 - protein, 1162 aa, Bacillus thuringiensis FPT-2
MSPNNQNEYEIIDMAPSTSVSNDSNRYPFASDPTNALQNMNYKEYLRMSEGYDSEYSGSPEVLISERDAVKTAISLVGTILGKLGVPLVGPIVSLYSTLIDVLWPGGKSQWEIFMEQVEALINQKIAEYARAKALAELEGLGNNYQLYLTALEEWQENPSSTRVLRDVRNRFEILDSLFTQYMPSFRVTGYEVPLLSVYAQAANLHLLLLKDASIFGEEWGFSTTAINNYYNRQMSLIAQYSDHCVQWYRTGLDRLKGSNAKQWVEYNRFRREMTLSVLDIMTLFPMYDMRTYPMETKAQLTREVYTDPIGAIGAQGSWYDSAPSFNTLESTFIRGKHLFDFITRLSIYTGRSSFSASNYLKKWIGHQISSQPIGGSIQTQTYGTTSGSSVIATQQIGFTGFDVYKTLSTAGVLFAYTSKYYGVSKVVFDAIYPDNKYKTTFTYNPGSEGIGAQEKDSEVELPPETLDQPNYEAYSHRLNYVTFIRNPDVPVFSWTHRSADRTASRNNFIYATKISQIPINKASRTSGGAVWNFQEGLYNGGPVMKLSGSGSQVINLRVATDAKGASQRYRIRIRYASDRAGKFTISSRSPENPATYSASIAYTNTMSTNASLTYSTFAYAESGPINLGISGSSRTFDISITKEAGAANLYIDRIEFIPVNTLFEAEEDLDVAKKAVNGLFTNEKDALQTSVTDYQVNQAANLIECLSDELYPNEKRMLWDAVKEAKRLVQARNLLQDTGFNRINGENGWTGSTGIEVVEGDVLFKDRSLRLTNAREIDTETYPTYLYQQIDESLLKPCTRYKLKGFIGSSQDLEIKLIRHRANQIVKNVPDNLLPDVRPVNSCGGVDRCSEQQYVDANLALENNGENGNMSFDSHAFSFHIDTGEIDLNENTGIWIVFKIPTTNGNATLGNLEFVEEGPLSGETLEWAQQQEQQWQDKMARKRAASEKTYYAAKQAIDRLFADYQDQKLNSGVEMSDLLAAQNLVQSIPYVYNDALPEIPGMNYTSFTELTNRLQQAWNLYDLQNAIPNGDFRNGLSNWNATSDVNVQQLSDTSVLVIPNWNSQVSQQFTVQPNYRYVLCVTARKEGVGDGYVIIRDGANQTETLTFNICDDDTGVLSTDQTSYITKTVEFTPSTEQVWIDMSETEGVFNIESVELVLEEE

SEQ ID NO: 494 - protein, 903 aa, Bacillus thuringiensis
MSPNNLNEYEIIDATPSTSVSNDSTRYPYANEPTNALQNMNYKDYLRMSEGYDNKYFANPEVFAAPGGITTGITIVTKLLGWLGLPFAGETGMALNFILGLLWPTSGNPWAELMILVEELINQKIEETVRNKALADLGNSGRALRSYLNAFEDWQKNPNIFRSKELVKERFSNAEHSLRTEMSSFAIRGFEIPLLATYAQAANLHLFLIKDIQIYGKEWGYTQADIDLFYREQVEFTKEYTEHCINIYNDGLNQLKGSNAKQWIAFNRFRREMTLTVLDVVALFPNYDVRMYPIKTTTELTRTIYTDPLGYTKTGSSSTPPWYNYGSSFSYIESVAIPAPSLVKWLSQIEIYSKSARATPQSADYWAGHTITYHYSGDDGQAVPNYGDRTNPVIVNRYNFEQADIYRVSSSVASSTTSGVKLLTTKAIFDGISTNNGLVSYMYEKLSNFFNELKDTITELPVQISSPPTYGDAEQYSHRLSYVSNAPTEYSSGGHLILGLIPVLGWTHTSLTQTNQIHSDSITQIPAVKANSVSSYVTVEKGTGFTGGDLVKFSTGFMSTGIQFNLKIEERKRYRIRIRYAADVNATLSALGLNDAFINIKSTMSQDTPLKYNDFQYAEADKTVHLYNPRFSLYLENSDQSGKSIYIDRIEFIPVDETYEAEQDLENAKKAVNALFTNTKDGLRPGVTDYEVNQAANLVECLSDDLYPNEKRLLFDAVREAKRLSEARNLLQDPDFQEINGENGWTASTGIEVVEGDALFKGRYLRLPGARQIDTETYPTYLYQKIDEGVLKPYTRYRLRGFVGRSQGLEIYTIRHQTNRIVKNVPDNLLPDASPGNAGDGINRCSEQKYVNSRLEGEKGLPNGSRSAEAHEFSIPIDTGEIDYNENAGIWVGFKITDPEQKQ

SEQ ID NO: 495 - protein, 1173 aa, Bacillus thuringiensis kenyae
MSPNNQNEYEIIDATPSTSVSNDSTRYPYANEPTNALQNMNYKDYLRMSEGYDNKYFANPEVFAAPGGITTGITIVTKLLGWLGLPFAGETGMALNFILGLLWPTSGNPWAELMILVEELINQKIEEAVRNKALADLANSGRALQSYLNAFEDWQKNPNIFRSKELVRERFANAEHSLRTEMSSFAIRGFEIPLLATYAQAANLHLFLIKDVQIYGKEWGYTQADIDLFYREQVEFTKEYTEHCINIYNDGLNQLKGSNAKQWIAFNRFRREMTLTVLDVVALFPNYDVRMYPIKTTTELTRTIYTDPLGYTKTGSSSTPPWYNYGSSFSYIESVAIPAPSLVKWLSQIEIYSKSARATPQSADYWAGHTITYHYSGNNDQVVANYGDRTNPVIVNRYNFEQADIYRVSSSVASSTTSGVKLLTTKAIFDGISTNNGLVSYMYEKLSNFFNELKDTITELPVQVSSSPTYGDAEQYSHRLSYVSNAPTEYSSGGHLILGLIPVLGWTHTSLTQTNQIHSDSITQIPAVKANSVSSYVTVEKGTGFTGGDLVKFSTGFMSTGIQFNLKIEERKRYRIRIRYAADVNARLSANHFGTTFINIKSTMSQDTPLKYNDFQYAETDGTLTLQDSHFSLFLEDSDQSGKSIYIDRIEFIPVDETYEAEQDLENAKKAVNALFTNTKDGLRPGVTDYEVNQAANLVECLSDDLYPNEKRLLFDAVREAKRLSEARNLLQDPDFQEINGENGWTASTGIEVVEGDALFKGRYLRLPGARQIDTETYPTYLYQKIDEGVLKPYTRYRLRGFVGRSQGLEIYTIRHQTNRIVKNVPDNLLPDASPGNAGDGINRCSEQKYVNSRLEGEKGLPNGSRSAEAHEFSIPIDTGEIDYNENAGIWVGFKITDPEGYATLGNLELVEEGPLSGDALERLQREEQQWKIQMTKRREETDRKYMIAKQAVDRLYADYQDQQLNPNVEITDITAAQNVIQSIPYVYNDAFPGLPGMNYTKFTELTDRLQQAWSLYDQRNAIPNGDFRNELSNWNTTAGVNVQQLNGTSVLVIPNWDAQVSQQFTVQPNQRYVLRVTARKEGVGNGYVSIRDGGNQTETLTFSASDYDTNGVYNIQASNTNGYNTNGVYNDQTGYITKTAEFIPHTNQVWIEMSETEGTFYIESVELIVDVE

SEQ ID NO: 496 - protein, 1157 aa, Bacillus thuringiensis
MSPNNQNEYEIIDMAPSTSVTNDSNRYPFANEPTNALQNMNYKDYLRMSEGYSPEYLTSLSPYSQFGTVDKIISIISLLNSAAGIPGLDFFTGLLQFILDFFAPEDPWAELMELVEQLIDQKITVATREKALAELRGLINGYLVYQQSLESWLENPNATRASIVREQYVALELDFVTSISSFAIAGQEVPLLAVYAQAANLHLLLLRDVSIFGEEWGLTVNEVNTFYIRQMTYTTEYSDYCVRIYNTGLNKLKGSSASSWVDYNRFRREMNLLVLDIIALFPNYDVRRYPMDTTTELTRVVYTDPIVFDERKGVASTHSWTAIAPSFSSIESLTRRPGLFTWLDQLTIFSKRISQPSVFINSWAGHKISTFRTQKTDILINTTHGDTNNPIKEFVVDTKKVEDIYQTIAYPHAVANEVFYLFGVPKVDFNMVPAGGSANSAHTLIFSDSTGGRLESITKNSEAELPPTESLSDTPQPNQVTYSHRLDYATIIKANKSYGSGYIPLLGWTHRSVDRQQTIYPQKITQIPAVKAFSYTESFNVNVIAGPGFTGGDLISLGHLENIYMKLNVPNPQKFRVRIRYAASTTSYLQITGLSNLAQSDRFEQTYSNENENNLMFENFQYVELRNIFSVDAPLENHQVSIQNYQGNGFVIIDRIEFIPVNATYDAENEAVNTTFTEGRNALQKYVTDYKVDQVDILVDCISGDLYPNEKRELQLLVKYAKRLSYSRNLLLDPTFDSINSSEENGWYGSNGIVIGNGDFVQKGNYLIFSGTNDTQYPTYLYQKIDESKLKEYSRYKLKGFIESSQDLEAYVRRYDAKHRTLDVSDNLLPDILPENTCGEPSRCAAQQYLDENPSSECSSMQDGILSDSHSFSLNIDTGSGNHNENLGIWVLFKISTLEGYAKFGNLEVIEDGPVIGEALARVKRQTTKWRNKLAQMTTETQAIYTRAKQALLNLFANAQDSHLKIDVTFAEIAAARKIVQSIREVYMSWLSVVPGVNHPIMTELSGRVQRAFQLYDVRNVVRNGRFLNGLSDWIVTSDVNVQEENGNMVLVLNNWDAQVLRNVKLYQDRGYVLRVTARKIGIEEGYITITDEEGHTDQLRFTACEEIDASNYFISGYITKELEFFPDTEKVHIEIGETEGEFLVESIELFLMEELC

SEQ ID NO: 497 - protein, 1121 aa, BGSC 4CC1
MEGGNNQGFINIEGRLSLEQVLAVSAGVASYILSNLGPFGVFFSYIIGAFWPTAPSDTRVWEAFMELIEARIDQKIQESTRKDAIARLQGLGAASEVYQESLESWLENQNDARAMSVVRQQFVAFELDFVTAMPFFERSGDEILLLAVYAQAANLHLLLLRDASLYGADWGMEPYDIANYYNRQKERTATYSNHCMEWYKKGLDELWSAGGYGGDVWQDYNDFRREMTLSVLDFVALFPNYDTHLYPIEVKGELTREIYTPGINIDIDRGRLGKVTLENALVNSPRLFSWLKEIQLFTNINFNPRWKFLSATRIGYKLTGYRSVNFEPYEGFYFEGLFQSNFTLNDYQEIYIVDVTRFGSLYDTPTAITAMTFFKDDNTTFNYSSNTPSGEPMITSGFYLPGIDGSEEPTSNNFSHRLSTINTYNTTNQTFYHTFGWTHVSVDRNNTIVSNKITQIPFVKANTGNVVRGPGHTGGDLVVFKPAARPDIVLRVGNTRLQSYRVRVRYASNADISLELDTTYEKTNIHLQKTFNSSEAEDLTYDNFQYAEADNIVWLGQDLSQYIEFQNAITNDSTAIAYFERVEFLPVGATYEAEQDLETAKKVVNALFTNTKNALQMSVTDYEVTQAANLVECVSDELFPNEKRLLFDAVKEAKRLSGIRNLLQDSDFQEINGENGWVGSIEIEIREGDTLFKGYSLRLPSAREIYMEMFPTYLHQKIEESRLKPYTRYRLRGFVSSSQDLEIFSIRHETNRIVKNVSDDLLPNLSSYYTCGGVNRCSTQKYVYNRLEFQNSLSSGNRYSDAHSFSIPIDTGKIDLNDNTGIWIAFKLATTGGYATLGNLELVEEAPLIGDTLERVQREDQQWKSQMTRKREEAERKYMAAKQAIDRLYADYQDHQLNPNVEITDITATQHLVQSLPYVNNDVLQEIPGMNYTRFTELTNRLQQAWELYGLRNMIANGDFRNGLNDWDATSGVNIQQINHTSVLVISNWDAQISKQFTVQPNQKYVLRVTVRKEGSGDGYVTIRDGGNHTETLTFNTCDYERSNVYNEKVFQSNDYGTNNVYHTQTTNANRYTTNSLYNDGTGYVTKTVEFIPYTEQVWIEMSETEGVFYVESIEFILEEV

SEQ ID NO: 498 - protein, 1173 aa, BtQ52-7
MSPNNQNEYEIIDASSPTSVSNNSVKYPLASDQTTTLQNMNYKDYLRMTERENPELSRNPETFISAQDAVGTGIDIVSTIISGVGIPVVGEVLSILGAILGLFWPSSGEDVWELFMERVEELIDQKIGTFAKDTAISNLGKSRIAVTSYRNALEAWQKNPNNARSISLVRERFADAEHTLRTNMSSFVISGYQIPFLATYAQAANLHLLVMKDVQIYGIQWGYTQGEIDLFYREQADFTAQYSDYCVKWYNAGLDKLRGTSAQQWVNYDRFRREMTVMALDIVALFPNYDVRMYPMQTNAELTREIYTPVGTFVTEAGSSFRRVISWHDMSTPNFPSFSTIENIVVRAPHMFRVLRELEISSMRRNNGSIEFYNYWSGQMTGHSNINNYSKISRVSGGDLTNDTTNVPLNNRNIYRAIWNYIGRVENSLLGVNPVDFFFTNNTRFTYNRPRSILWGGAGELRIDSGEELPFKSHTDYSHIVSSASSFPLFSNFGTRLGSVVTFGWTHSSVDLENTIHPDKITQIPAVKAFASSVTAEAVKGVGNTGGNLVRLYSGGLYTAITMRFKVAERKQYRVRIRYAANVNATLSLRNYTSTTNYTSTTINLTSTMNEKEPSSYNDFRYVEATRVISLNNHTEFRMIEESSSQIGGYIYIDKIEFIPVDATYEAEQDLDVAKKAVNGLFTNTKDALQTSITDYQVNQAANLVECLSDELYPNEKRMLWHAVKEAKRLVQARNLLQDTGFNVINGENGWTGSTGIEVVEGDVLFKDRSLRLPSAREIDTETYPTYLYQQIDESLLKPYTRYRLRGFIGSSQDLEIKLIRHRANQIVKNVPDNLLPDVRPVNSCGGVDRCSEQQYVDANLALENNGENRNMSSDSHAFSFHMDTGEIDLNENTGIWVVFKIPTTNGYATLGNLELVEEGPLSGEVLERAQQQEQQWQDKMVRKRTASEKANYAAKQAIDRLFADYQDQQLNSGVEMSDLLAAQNLIQSIPYVYNEMLPEIPGMNYTNFTELTNRLQQAWNLYDLRNAIPNGDFRNGLSDWNATSDINVQQLNDTSILVIPNWNSQVSQQFTVQPNYRYVLRVTARKEGVGDGYVSIRDGGNQTETLTFSASDYNTPASNTNGYNTNGVYNDQTGYITKTVTFIPYTDQVWIEMSETEGVFNIESVELVLEEE

SEQ ID NO: 499 - protein, 1204 aa, Bacillus thuringiensis R36
MSPNNQNEYEIIDTPSRTSVSNDSVRYPFANEPTTDLNNMNYKDYLRMSEVDDATFLSNPEAFIDSKSVQTIIGIVGKGLGVLGVPGAAAIAQFFSFLVGQLWPSTGEFIWEQIIEQVEALVDQKITDYARNKALSEVQGLGEAFAVYQQSLQTWQENRTDSRVRGVIIQQFIALDLDFVNKMPSFAVSGQEVPLLAVYALAANIHLLLLRDASLFGAEWGFATPEISDYYNRQIQLITKYTDYCVNWYNTGLGYMRKVDSTGSGNRQTRNWLRYHQFRREMTLMVLDVLALFPGYDIRTYPGNVHFQLTREVYTDPIVFNPSSKPSGKFCDPWESRYEYDYLSEMENVLVRPPHLFEIFVNNTYFTGRGTILFNDNEYINYMIGNKITYRYTNDDTRYERNYGSSSTETNSLIFGLSDEFDIFNISSVAANLANYYGNRYGFPYARWYCGSGLGGSGYNTFTYSRTHTTNQICTQSYDAQNELPPEGSQSQADYSHRLAHIASYTIPVKSGGGISGNIPLYAWTHRSASKFNYITPNRINHLPMVKSYILPTGTSVVQGPGFTGGNLLKRATSGQIAKLKVELINFGLSAQYRVRIRYASTSTLNFRVFQTGTLVNDLNFNRTMSRGESLTHNKFKFASFTTPFMFTSKFSELRIDVSNLSSGEEVYVDSIEVIPVNATYEAETNLEVAKKAVMSCLRMQRALQTDVTDYQVNQVANLIECVSDEVYPNEKRLLFDAVKEAKRLDQARNLLQDPNFQEINGENGWTGSTGIEIVEGDLPFKDRSLRLPSAREMERETYPTYIYQKIEESRLKPNTRYKFRGFIGSSQDLEIYVIRHQAYRVIKNVSNNLLPNMRPINACGGVDRCNEQKQVNTVLGLENNVPNGNTMSDSHEFSIPVDTGELNYNENPGIWVVFKITTTDGYATVGNIELVEEETLSGEALERVQQQEKRWQDQMARRRAETENRYGIAKQAIDRLFVDYSKVSSSIEISDLTAAQNLVQSIPYVYNEMLPEIPGMNYTSVTELTNRLQQAWNLYDQRNSIQNGDFRNDVRNWNVTPGVNIQQMNDTSVLVIPNWDSQVSQQITVQPNRRYVLRVTARKEGNGDGYVTIRDGANHTETLTFNTCDYDGSSVYDNQAFNANNDVYTTQSSNTNRYNTNGVYHDQTSYITKTVEFIPYTEQVWIEMSETEGVFYVESVELIVEEM

SEQ ID NO: 500 - protein, 802 aa, Bacillus thuringiensis
MNQNKHGIIGASNCGCASDDVAKYPLANNPYSSALNLNSCQNSSILNWINIIGDAAKEAVSIGTTIVSLITAPSLTGLISIVYDLIGKVLGGSSGQSISDLSICDLLSIIDLRVSQSVLNDGIADFNGSVLLYRNYLEALDSWNKNPNSASAEELRTRFRIADSEFDRILTRGSLTNGGSLARQNAQILLLPSFASAAFFHLLLLRDATRYGTNWGLYNATPFINYQSKLVELIELYTDYCVHWDNRGSTELRQRGPSATAWLEFHRYRREMTLMGLEIVASFSSLDITNYPIETDFQLSRVIYTDPIGFVHRSSLRGESWFSFVNRANFSDLENAIPNPRPSWFLNNMIISTGSLTLPVSPSTDRARVWYGSRDRISPANSQFITELISGQHTTATQTILGRNIFRVDSQACNLNDTTYGVNRAVFYHDASEGSQRSVYEGYIRTTGIDNPRVQNINTYLPGENSDIPTPEDYTHILSTTINLTGGLRQVASNRRSSLVMYGWTHKSLARNNTINPDRITQIPLTKVDTRGTGVSYVNDPGFIGGALLQRTDHGSLGVLRVQFPLHLRQQYRIRVRYASTTNIRLSVNGSFGTISQNLPSTMRLGEDLRYGSFAIREFNTSIRPTASPDQIRLTIEPSFIRQEVYVDRIEFIPVNPTREAKEDLEAAKKAVASLFTRTRDGLQVNVKDYQVDQAANLVSCLSDEQYGYDKKMLLEAVRAAKRLSRERNLLQDPDFNTINSTEENGWKASNGVTISEGGPFYKGRAIQLASARENYPTYIYQKVDASELKPYTRYRLDGFVK

SEQ ID NO: 501 - protein, 1156 aa, Bacillus thuringiensis galleriae
MNQNKHGIIGASNCGCASDDVAKYPLANNPYSSALNLNSCQNSSILNWINIIGDAAKEAVSIGTTIVSLITAPSLTGLISIVYDLIGKVLGGSSGQSISDLSICDLLSIIDLRVSQSVLNDGIADFNGSVLLYRNYLEALDSWNKNPNSASAEELRTRFRIADSEFDRILTRGSLTNGGSLARQNAQILLLPSFASAAFFHLLLLRDATRYGTNWGLYNATPFINYQSKLVELIELYTDYCVHWYNRGFNELRQRGTSATAWLEFHRYRREMTLMVLDIVASFSSLDITNYPIETDFQLSRVIYTDPIGFVHRSSLRGESWFSFVNRANFSDLENAIPNPRPSWFLNNMIISTGSLTLPVSPSTDRARVWYGSRDRISPANSQFITELISGQHTTATQTILGRNIFRVDSQACNLNDTTYGVNRAVFYHDASEGSQRSVYEGYIRTTGIDNPRVQNINTYLPGENSDIPTPEDYTHILSTTINLTGGLRQVASNRRSSLVMYGWTHKSLARNNTINPDRITQIPLTKVDTRGTGVSYVNDPGFIGGALLQRTDHGSLGVLRVQFPLHLRQQYRIRVRYASTTNIRLSVNGSFGTISQNLPSTMRLGEDLRYGSFAIREFNTSIRPTASPDQIRLTIEPSFIRQEVYVDRIEFIPVNPTREAKEDLEAAKKAVASLFTRTRDGLQVNVKDYQVDQAANLVSCLSDEQYGYDKKMLLEAVRAAKRLSRERNLLQDPDFNTINSTEENGWKASNGVTISEGGPFYKGRAIQLASARENYPTYIYQKVDASELKPYTRYRLDGFVKSSQDLEIDLIHHHKVHLVKNVPDNLVSDTYPDDSCSGINRCQEQQMVNAQLETEHHHPMDCCEAAQTHEFSSYIDTGDLNSSVDQGIWAIFKVRTTDGYATLGNLELVEVGPLSGESLEREQRDNTKWSAELGRKRAETDRVYQDAKQSINHLFVDYQDQQLNPEIGMADIMDAQNLVASISDVYSDAVLQIPGINYEIYTELSNRLQQASYLYTSRNAVQNGDFNNGLDSWNATAGASVQQDGNTHFLVLSHWDAQVSQQFRVQPNCKYVLRVTAEKVGGGDGYVTIRDDAHHTETLTFNACDYDINGTYVTDNTYLTKEVVFHPETQHMWVEVNETEGAFHIDSIEFVETEK

SEQ ID NO: 502 - protein, 1151 aa, Bacillus thuringiensis DSIR517
MNQNKHGIIGASNCGCASDDVAKYPLANNPYSSALNLNSCQNSSILNWINIIGDAAKEAVSIGTTIVSLITAPSLTGLISIVYDLIGKVLGGSSGQSISDLSICDLLSIIDLRVSQSVLNDGIADFNGSVLLYRNYLEALDSWNKNPNSASAEELRTRFRIADSEFDRILTRGSLTNGGSLARQNAQILLLPSFASAAFFHLLLLRDATRYGTNWGLYNATPFINYQSKLVELIELYTDYCVHWYNRGFNELRQRGTSATAWLEFHRYRREMTLMVLDIVASFSSLDITNYPIETDFQLSRVIYTDPIGFVHRSSLRGESWFSFVNRANFSDLENAIPNPRPSWFLNNMIISTGSLTLPVSPSTDRARVWYGSRDRISPANSQFITELISGQHTTATQTILGRNIFRVDSQACNLNDTTYGVNRAVFYHDASEGSQRSVYEGYIRTTGIDNPRVQNINTYLPGENSDIPTPEDYTHILSTTINLTGGLRQVASNRRSSLVMYGWTHKSLARNNTINPDRITQIPLTKVDTRGTGVSYVNDPGFIGGALLQRTDHGSLGVLRVQFPLHLRQQYRIRVRYASTTNIRLSVNGSFGTISQNLPSTMRLGEDLRYGSFAIREFNTSIRPTASPDQIRLTIEPSFIRQEVYVDRIEFIPVNPTREAKEDLEAAKKAVASLFTRTRDGLQVNVKDYQVDQAANLVSCLSDEQYGYDKKMLLEAVRAAKRLSRERNLLQDPDFNTINSTEENGWKASNGVTISEGGPFYKGRAIQLASARENYPTYIYQKVDASELKPYTRYRLDGFVKSSQDLEIDLIHHHKVHLVKNVPDNLVSDTYPDDSCSGINRCQEQQMVNAQLETEHHHPMDCCEAAQTHEFSSYIDTGDLNSSVDQGIWAIFKVRTTDGYATLGNLELVEVGPLSGESLEREQRDNTKWSAELGRKRAETDRVYQDAKQSINHLFVDYQDQQLNPEIGMADIMDAQNLVASISDVYSDAVLQIPGINYEIYTELSNRLQQASYLYTSRNAVQNGDFNNGLDSWNATAGASVQQDGNTHFLVLSHWDAQVSQQFRVQPNCKYVLRVTAEKVGGGDGYVTIRDDAHHTETLTFNACDYDINGTYVTDNTYLTKEVVFHPETQHMWVEVNETEGAFHIDSIEF

SEQ ID NO: 503 - protein, 1144 aa, Bacillus thuringiensis galleriae
VFELKTCIWHAFFLTKLSSYKDYLKMSEGDYIDSYINPGNVRTGLQTGIDIVAVVVGALGGPVGGILTGFLSTLFGFLWPSNDQAVWEAFIEQMEELIEQRISDQVVRTALDDLTGIQNYYNQYLIALKEWEERPNGVRANLVLQRFEILHALFVSSMPSFGSGPGSQRFQAQLLVVYAQAANLHLLLLADAEKYGARWGLRESQIGNLYFNELQTRTRDYTNHCVNAYNNGLAGLRGTSAESWLKYHQFRREATLMAMDLIALFPYYNTRRYPIAVNPQLTREVYTDPLGVPSEESSLFPELRCLRWQETSAMTFSNLENAIISSPHLFDTINNLMIYTGSFSVHLTNQLIEGWIGHSVTSSLLASGPTTVLRRNYGSTTSIVNYFSFNDRDVYQINTRSHTGLGFQNAPLFGITRAQFYPGGTYSVTQRNALTCEQNYNSIDELPSLDPNEPISRSYSHRLSHITSYLHRVLTIDGINIYSGNLPTYVWTHRDVDLTNTITADRITQLPLVKSFEIPAGTTVVRGPGFTGGDILRRTGVGTFGTIRVRTTAPLTQRYRIRFRFASTTNLFIGIRVGDRQVNYFDFGRTMNRGDELRYESFATREFTTDFNFRQPQELISVFANAFSAGQEVYFDRIEIIPVNPAREAKEDLEAAKKAVASLFTRTRDGLQVNVKDYQVDQAANLVSCLSDEQYGYDKKMLLEAVRAAKRLSRERNLLQDPDFNTINSTEENGWKASNGVTISEGGPFYKGRALQLASARENYPTYIYQKVDASELKPYTRYRSDGFVKSSQDLEIDLIHHHKVHLVKNVPDNLVSDTYPDDSCSGINRCQEQQMVNAQLETEHHHPMDCCEAAQTHEFSSYIDTGDLNSSVDQGIWAIFKVRTTDGYATLGNLELVEVGPLSGESLEREQRDNTKWSAELGRKRAETDRVYQDAKQSINHLFVDYQDQQLNPEIGMADIMDAQNLVASISDVYSDAVLQIPGINYEIYTELSNRLQQASYLYTSRNAVQNGDFNNGLDSWNATAGASVQQDGNTHFLVLSHWDAQVSQQFRVQPNCKYVLRVTAEKVGGGDGYVTIRDGAHHTETLTFNACDYDINGTYVTDNTYLTKEVIFYSHTEHMWVEVNETEGAFHIDSIEFVETEK

SEQ ID NO: 504 - protein, 1164 aa, Bacillus thuringiensis B-SC5
MNRNNQNEYEVIDTSTCGCPSGDVMQYPLANDPNAALQNMNYKEYLQMSEGDYIDSYINPGNVRTGLQTGIDIVAVVVGALGGPVGGILTGFLSTLFGFLWPSNDQAVWEAFIEQMEELIEQRISDQVVRTALDDLTGIQNYYNQYLIALKEWEERPNGVRANLVLQRFEILHALFVSSMPSFGSGPGSQRFQAQLLVVYAQAANLHLLLLADAEKYGARWGLRESQIELYFNELQTRTRDYTNHCVNAYNNGLAGLRGTSAESWLKYHQFRREATLMAMDLIALFPYYNTRRYPIAVNPQLTREVYTDPLGVPSEESSLFPELRCLRWQETSAMTFSNLENAIIRPPHLFDTINNLMIYTGSFRFTNNQLIEGWIGHSVTSSLLASGPTTVVRRNYGSTTSIVNYFSFNDRDVYQINTRSHTGLGFQNAPLFGITRAQFYPGGTYSVTQRNALTCEQNYNSIDELPSLDPNEPISRSYSHRLSHITSYLHRVLTIDGINIYSGNLPTYVWTHRDVDLTNTITADRITQLPLVKSFEIPAGTTVVRGPGFTGGDILRRTGVGTFGTIRVRTTAPLTQRYRIRFRFASTTNLFIGIRVGDRQVNYFDFGRTMNRGDELRYESFATREFTTDFNFRQPQELISVFANAFSAGQEVYFDRIEIIPVNPAREAKEDLEAAKKAVASLFTRTRDGLQVNVKDYQVDQAANLVSCLSDEQYGYDKKMLLEAVRAAKRLSRERNLLQDPDFNTINSTEENGWKASNGVTISEGGPFYKGRALQLASARENYPTYIYQKVDASELKPYTRYRLDGFVKSSQDLEIDLIHHHKVHLVKNVPDNLVSDTYPDDSCSGINRCQEQQMVNAQLETEHHHPMDCCEAAQTHEFSSYIDTGDLNSSVDQGIWAIFKVRTTDGYATLGNLELVEVGPLSGESLEREQRDNTKWSAELGRKRAETDRVYQDAKQSINHLFVDYQDQQLNPEIGMADIMDAQNLVASISDVYSDAVLQIPGINYEIYTELSNRLQQASYLYTSRNAVQNGDFNNGLDSWNATAGASVQQDGNTHFLVLSHWDAQVSQQFRVQPNCKYVLRVTAEKVGGGDGYVTIRDGAHHTETLTFNACDYDINGTYVTDNTYLTKEVIFYSHTEHMWVEVNETEGAFHIDSIEFVETEK

SEQ ID NO: 505 - protein, 1163 aa, Bacillus thuringiensis japonensis
MNRNNQNEYEVIDTSTCGCPSGDVMQYPLANDPNAALQNMNYKEYLQMYGGDYADAFINPGNVRTGLQTGIDIVALLVGTLGGAVGGILTGLLSTLFGFLWPSNDQAVWEAFIEQMEELIEQRISDQVVRTALDNLTGIQNYYNQYLLAFEEWEEAPNSVRSNLVLQRFENLHALFVSSMPSFGSGPGSQRFEAQLLLVYAQAANLHLLLLRDAEIYGARWGLRESQIQLYFDELQNNTRDYTNHCVNAYNNGLEQVRGTNAASWLKYHQFRRETTLTAMDLVALFPYYNLRQYPIAVNPQLTREVYTDPLGVPFEESNPSSEIRCSRWQDTSAMTFSNLENALVRPPHLFDTIRNLRIYTGTFRVNNNNFIEGWIGHSVTNNRLGISTEFTRNYGITTPIINSYNFANGDVYQINTRSNTSLIAFENAPLFGITRAQFQPGGTYSVTQRTLLCEQNYNSTDELPSLDPDEPISRSYSHRLSHITSYLHRVFTIDGNNIYSGNLPTYVWTHRDVDLTNTITADRITHLPLIKSNVQRSGLPVKGPGFTGGDVLRSSSSDADVSIIGVSAGAPLTQQYRIRVRYASNVDVTIRFVRHNTHSLLGIGTLSRTMNSGEESRYESYRTVDVITNFRLNSSSEQIRIVTEGLRANGQLYLDSLEFIPINPTREAEEDLEAAKKAVASLFTRTRDGLQANVTDYQVDRAANLVLCLSDEQYAHDKKMLLEAVRAAKRLSRERNLLQDPDFNEINSTEDSGWKTSNGIIISEGGPFFKGRALQLASARENYPTYIYQKVDSSMLKPYTRYKLDGFVQSSQDLEIELIHHHKVHLVKNVPDNLVLDTYPDGSCNGINRCEEQQMVNSQLETEHHPMDCCEASQTHEFSSYIHTGDLNASVDQGIWVVLKIRTTDGSATLGNLELVEVGPLSGESLEREQRDNAKWNAELGRKRAEADRVYQGAKQAINHLFVDYQDQQLNPEVGLAEISEARNLIESISDVYCDAVLRIPGINYEMYTELSNRLQQAAYLYTSRNAVQNGDFNSGLDSWNATTDATVQQDGNMYFLVLSHWDAQVSQQFRVQPNCKYVLRVTAKKVGNGDGYVTIQDGAHHRETLTFNACDYDVNGTHVNDNSYITKELEFYPKTEHMWVEVSETEGTFYIDSIELIETQE

SEQ ID NO: 506 - protein, 1157 aa, Bacillus thuringiensis tolworthi
MNRNNQNEYEIIDAPHCGCPSDDDVRYPLASDPNAALQNMNYKDYLQMTDEDYTDSYINPSLSISGRDAVQTALTVVGRILGALGVPFSGQIVSFYQFLLNTLWPVNDTAIWEAFMRQVEELVNQQITEFARNQALARLQGLGDSFNVYQRSLQNWLADRNDTRNLSVVRAQFIALDLDFVNAIPLFAVNGQQVPLLSVYAQAVNLHLLLLKDASLFGEGWGFTQGEISTYYDRQLELTAKYTNYCETWYNTGLDRLRGTNTESWLRYHQFRREMTLVVLDVVALFPYYDVRLYPTGSNPQLTREVYTDPIVFNPPANVGLCRRWGTNPYNTFSELENAFIRPPHLFDRLNSLTISSNRFPVSSNFMDYWSGHTLRRSYLNDSAVQEDSYGLITTTRATINPGVDGTNRIESTAVDFRSALIGIYGVNRASFVPGGLFNGTTSPANGGCRDLYDTNDELPPDESTGSSTHRLSHVTFFSFQTNQAGSIANAGSVPTYVWTRRDVDLNNTITPNRITQLPLVKASAPVSGTTVLKGPGFTGGGILRRTTNGTFGTLRVTVNSPLTQQYRLRVRFASTGNFSIRVLRGGVSIGDVRLGSTMNRGQELTYESFFTREFTTTGPFNPPFTFTQAQEILTVNAEGVSTGGEYYIDRIEIVPVNPAREAEEDLEAAKKAVASLFTRTRDGLQVNVTDYQVDQAANLVSCLSDEQYGHDKKMLLEAVRAAKRLSRERNLLQDPDFNTINSTEENGWKASNGVTISEGGPFFKGRALQLASARENYPTYIYQKVDASVLKPYTRYRLDGFVKSSQDLEIDLIHHHKVHLVKNVPDNLVSDTYSDGSCSGINRCDEQHQVDMQLDAEHHPMDCCEAAQTHEFSSYINTGDLNASVDQGIWVVLKVRTTDGYATLGNLELVEVGPLSGESLEREQRDNAKWNAELGRKRAEIDRVYLAAKQAINHLFVDYQDQQLNPEIGLAEINEASNLVESISGVYSDTLLQIPGINYEIYTELSDRLQQASYLYTSRNAVQNGDFNSGLDSWNTTMDASVQQDGNMHFLVLSHWDAQVSQQLRVNPNCKYVLRVTARKVGGGDGYVTIRDGAHHQETLTFNACDYDVNGTYVNDNSYITEEVVFYPETKHMWVEVSESEGSFYIDSIEFIETQE

SEQ ID NO: 507 - protein, 1156 aa, Bacillus thuringiensis
MNRNNQNEYEIIDAPHCGCPSDDDVRYPLASDPNAALQNMNYKDYLQMTDEDYTDSYINPSLSISGRDAVQTALTVVGRILGALGVPFSGQIVSFYQFLLNTLWPVNDTAIWEAFMRQVEELVNQQITEFARNQALARLQGLGDSFNVYQRSLQNWLADRNDTRNLSVVRAQFIALDLDFVNAIPLFAVNGQQVPLLSVYAQAVNLHLLLLKDASLFGEGWGFTQGEISTYYDRQLELTAKYTNYCETWYNTGLDRLRGTNTESWLRYHQFRREMTLVVLDVVALFPYYDVRLYPTGSNPQLTREVYTDPIVFNPPANVGLCRRWGTNPYNTFSELENAFIRPPHLFDRLNSLTISSNRFPVSSNFMDYWSGHTLRRSYLNDSAVQEDSYGLITTTRATINPGVDGTNRIESTAVDFRSALIGIYGVNRASFVPGGLFNGTTSPANGGCRDLYDTNDELPPDESTGSSTHRLSHVTFFSFQTNQAGSIANAGSVPTYVWTRRDVDLNNTITPNRITQLPLVKASAPVSGTTVLKGPGFTGGGILRRTTNGTFGTLRVTVNSPLTQRYRVRVRFASSGNFSIRILRGNTSIAYQRFGSTMNRGQELTYESFVTSEFTTNQSDLPFTFTQAQENLTILAEGVSTGSEYFIDRIEIIPVNPAREAEEDLEAAKKAVANLFTRTRDGLQVNVTDYQVDQAANLVSCLSDEQYGHDKKMLLEAVRAAKRLSRERNLLQDPDFNTINSTEENGWKASNGVTISEGGPFFKGRALQLASARENYPTYIYQKVDASVLKPYTRYRLDGFVKSSQDLEIDLIHHHKVHLVKNVPDNLVSDTYSDGSCSGINRCDEQHQVDMQLDAEHHPMDCCEAAQTHEFSSYINTGDLNASVDQGIWVVLKVRTTDGYATLGNLELVEVGPLSGESLEREQRDNAKWNAELGRKRAEIDRVYLAAKQAINHLFVDYQDQQLNPEIGLAEINEASNLVESISGVYSDTLLQIPGINYEIYTELSDRLQQASYLYTSRNAVQNGDFNSGLDSWNTTMDASVQQDGNMHFLVLSHWDAQVSQQLRVNPNCKYVLRVTARKVGGGDGYVTIRDGAHHQETLTFNACDYDVNGTYVNDNSYITEEVVFYPETKHMWVEVSESEGSFYIDSIEFIETQE

SEQ ID NO: 508 - protein, 1169 aa, Bacillus thuringiensis japonensis N141
MNRNNQNEYEVIDAPHCGCPADDVVKYPLTDDPNAGLQNMNYKEYLQTYGGDYTDPLINPNLSVSGKDVIQVGINIVGRLLSFFGFPFSSQWVTVYTYLLNSLWPDDENSVWDAFMERVEELIDQKISEAVKGRALDDLTGLQYNYNLYVEALDEWLNRPNGARASLVSQRFNILDSLFTQFMPSFGSGPGSQNYATILLPVYAQAANLHLLLLKDADIYGARWGLNQTQIDQFHSRQQSLTQTYTNHCVTAYNDGLAELRGTTAESWFKYNQYRREMTLTAMDLVALFPYYNLRQYPDGTNPQLTREVYTDPIAFDPLEQPTTQLCRSWYINPAFRNHLNFSVLENSLIRPPHLFERLSNLQILVNYQTNGSAWRGSRVRYHYLHSSIIQEKSYGLLSDPVGANINVQNNDIYQIISQVSNFASPVGSSYSVWDTNFYLSSGQVSGISGYTQQGIPAVCLQQRNSTDELPSLNPEGDIIRNYSHRLSHITQYRFQATQSGSPSTVSANLPTCVWTHRDVDLDNTITANQITQLPLVKAYELSSGATVVKGPGFTGGDVIRRTNTGGFGAIRVSVTGPLTQRYRIRFRYASTIDFDFFVTRGGTTINNFRFTRTMNRGQESRYESYRTVEFTTPFNFTQSQDIIRTSIQGLSGNGEVYLDRIEIIPVNPAREAEEDLEAAKKAARQNLFTRTRDGLQVNVTDYQVDQAANLVSCLSDEQYGHDKKMLLEAVRAAKRLSRERNLLQDPDFNTINSTEENGWKASNGVTISEGGPFFKGRALQLASARENYPTYIYQKVDASVLKPYTRYRLDGFVKSSQDLEIDLIHYHKVHLVKNVPDNLVSDTYSDGSCSGMNRCEEQQMVNAQLETEHHHPMDCCEAAQTHEFSSYINTGDLNASVDQGIWVVLKVRTTDGYATLGNLELVEVGPLSGESLEREQRDNAKWNAELGRKRAEIDRVYLAAKQAINHLFVDYQDQQLNPEIGLAEINEASNLVESISGVYSDTLLQIPGINYEIYTELSDRLQQASYLYTSRNAVQNGDFNSGLDSWNTTTDASVQQDGNMHFLVLSHWDAQVSQQLRVNPNCKYVLRVTARKVGGGDGYVTIRDGAHHQETLTFNACDYDVNGTYVNDNSYITEEVVFYPETKHMWVEVSESEGSFYIDSIEFIETQE

SEQ ID NO: 509 - protein, 645 aa, Bacillus thuringiensis japonensis
HCGCPADDVVKYPLTDDPNAGLQNMNYKEYLQTYGGDYTDPLINPNLSVSGKDVIQVGINIVGRLLSFFGFPFSSQWVTVYTYLLNSLWPDDENSVWDAFMERVEELIDQKISEAVKGRALDDLTGLQYNYNLYVEALDEWLNRPNGARASLVSQRFNILDSLFTQFMPSFGSGPGSQNYATILLPVYAQAANLHLLLLKDADIYGARWGLNQTQIDQFHSRQQSLTQTYTNHCVTAYNDGLAELRGTTAESWFKYNQYRREMTLTAMDLVALFPYYNLRQYPDGTNPQLTREVYTDPIAFDPLEQPTTQLCRSWYINPAFRNHLNFSVLENSLIRPPHLFERLSNLQILVNYQTNGSAWRGSRVRYHYLHSSIIQEKSYGLLSDPVGANINVQNNDIYQIISQVSNFASPVGSSYSVWDTNFYLSSGQVSGISGYTQQGIPAVCLQQRNSTDELPSLNPEGDIIRNYSHRLSHITQYRFQATQSGSPSTVSANLPTCVWTHRDVDLDNTITANQITQLPLVKAYELSSGATVVKGPGFTGGDVIRRTNTGGFGAIRVSVTGPLTQRYRIRFRYASTIDFDFFVTRGGTTINNFRFTRTMNRGQESRYESYRTVEFTTPFNFTQSQDIIRTSIQGLSGNGEVYLD

SEQ ID NO: 510 - protein, 1169 aa, Bacillus thuringiensis kurstaki DP1019
MNRNHQNEYEIIDAPHCGCPSDDVVKYPLTDDPNAGLQNMNYKEYLQMYGGDYTDPLINPNLSVSGKDVIQVGINIVGRLLSFFGFPFSSQWVTVYTYLLNSLWPDDENSVWDAFMKRIEELIDQKISEAVKGRALDELTGLQDNYNLYVEALDEWLNRPNGARASLVSQRFNILDSLFTQFMPSFGSGPGSQNYSTILLPVYAQAANLHLLLLKDADIYGARWGLNQTQIDQFHSRQQSLTRTYTNHCVTTYNDGLAELRGTSVESWLKYHQYRREMTVTAMDLVALFPYYNVRQYPNGANPQLTREVYTDPIVFNPPEPPSGAFCESFYNIRAARERLTFSQLENAIIRPPRLFERFQALGIYTGEARLNQNSAPTNYWIGHFIRNTRLGDSTTITTNYGTTNNRLTNFIPPTTSDVYQINSISSNLASALSTLFGVTRAQFHYGSGIIWSYVGQNNVLPQCHQNYNSIEELPNQSDEPTVRSYSHRLSHITSFNFSVQLNNPVISLGNMPVYVWTHRSVDLNNTITSDRITQLPAVKASTLGAGAIVVKGPGFTGGDVIRRTSVGDFGTIRVSVTGSLTQQYRIRFRYASTIDFDFFVIRGGTTINNFRFTHTMSSGEESRYESYRTVEFSTPFNFTQSQDIIRTSIQGLSGNGEVYLDRIEIIPVNPTREAEEDLEDAKKAVAGLFTRTRDGLQVNVTDYQVDRAANLVSCLSDEQYSHDKKMLMEAVRAAKRLSRERNLLQDPDFNEINSTEENGWKASNGIIISEGGPFFKGRVLQLASARENYPTYIYQKVDASVLKPYTRYRLDGFVKSSEDLEIDLVHQHKVHLVKNVPDNLVSDTYPDGSCRGVNRCDEQHQVDVQIDTEHHPMDCCEAAQTHEFSSYINTGDLNSSVDQGIWVVLKVRTADGYATLGNLELVEVGPLSGESLEREQRDNAKWNAELGRERAETDRVYLAAKQAINHLFVDYQDQQLNPEIGLAEINEASNLVESITGVYSDTVLQIPGISYEIYTELSDRLQQASYLYTSRNAVQNGDFDSGLDSWNATTDASVQQDGNMHFLVLSHWDAQVTQQLRVNPNCKYVLRVTARKVGGGDGYVTIRDGAHHRETLTFNACDYDVNGTYVNDNTYITKEVVFYPHTEHTWVEVSESEGAFYIDSIELIETQE

SEQ ID NO: 511 - protein, 1150 aa, Bacillus thuringiensis aizawai SSK-10
MNRNNPNEYEIIDAPYCGCPSDDDVRYPLASDPNAAFQNMNYKEYLQTYDGDYTGSLINPNLSINPRDVLQTGINIVGRILGFLGVPFAGQLVTFYTFLLNQLWPTNDNAVWEAFMAQIEELIDQKISAQVVRNALDDLTGLHDYYEEYLAALEEWLERPNGARANLVTQRFENLHTAFVTRMPSFGTGPGSQRDAVALLTVYAQAANLHLLLLKDAEIYGARWGLQQGQINLYFNAQQERTRIYTNHCVETYNRGLEDVRGTNTESWLNYHRFRREMTLMAMDLVALFPFYNVRQYPNGANPQLTREIYTDPIVYNPPANQGICRRWGNNPYNTFSELENAFIRPPHLFERLNRLTISRNRYTAPTTNSFLDYWSGHTLQSQHANNPTTYETSYGQITSNTRLFNTTNGARAIDSRARNFGNLYANLYGVSSLNIFPTGVMSEITNAANTCRQDLTTTEELPLENNNFNLLSHVTFLRFNTTQGGPLATLGFVPTYVWTREDVDFTNTITADRITQLPWVKASEIGGGTTVVKGPGFTGGDILRRTDGGAVGTIRANVNAPLTQQYRIRLRYASTTSFVVNLFVNNSAAGFTLPSTMAQNGSLTYESFNTLEVTHTIRFSQSDTTLRLNIFPSISGQEVYVDKLEIVPINPTREAEEDLEDAKKAVASLFTRTRDGLQVNVTDYQVDQAANLVSCLSDEQYGHDKKMLLEAVRAAKRLSRERNLLQDPDFNEINSTEENGWKASNGVTISEGGPFFKGRALQLASARENYPTYIYQKVDASTLKPYTRYKLDGFVQSSQDLEIDLIHHHKVHLVKNVPDNLVSDTYSDGSCSGINRCEEQHQVDVQLDAEDHPKDCCEAAQTHEFSSYIHTGDLNASVDQGIWVVLQVRTTDGYATLGNLELVEVGPLSGESLEREQRDNAKWNEEVGRKRAETDRIYQDAKQAINHLFVDYQDQQLSPEVGMADIIDAQNLIASISDVYSDAVLQIPGINYEMYTELSNRLQQASYLYTSRNVVQNGDFNSGLDSWNATTDTAVQQDGNMHFLVLSHWDAQVSQQFRVQPNCKYVLRVTAKKVGNGDGYVTIQDGAHHRETLTFNACDYDVNGTHVNDNSYITKELVFYPKTEHMWVEVSETEGTFYIDSIEFIETQE

SEQ ID NO: 512 - protein, 1150 aa, Bacillus thuringiensis B-Hm-16; identical to SEQ ID NO: 511

SEQ ID NO: 513 - protein, 1150 aa, Bacillus thuringiensis lyA
MNRNNPNEYEIIDAPYCGCPSDDDVRYPLASDPNAAFQNMNYKEYLQTYDGDYTGSLINPNLSINPRDVLQTGINIVGRILGFLGVPFAGQLVTFYTFLLNQLWPTNDNAVWEAFMAQIEELIDQKISAQVVRNALDDLTGLHDYYEEYLAALEEWLERPNGARANLVTQRFENLHTAFVTRMPSFGTGPGSQRDAVALLTVYAQAANLHLLLLKDAEIYGARWGLQQGQINLYFNAQQERTRIYTNHCVETYNRGLEDVRGTNTESWLNYHRFRREMTLMAMDLVALFPFYNVRQYPNGANPQLTREIYTDPIVYNPPANQGICRRWGNNPYNTFSELENAFIRPPHLFERLNRLTISRNRYTAPTTDSFLDYWSGHTLQSQHANNPTTYETSYGQITSNTRLFNTTNGARAIDSRARNFGNLYANLYGVSSLNIFPTGVMSEITNAANTCRQDLTTTEELPLENNNFNLLSHVTFLRFNTTQGGPLATLGFVPTYVWTREDVDFTNTITADRITQLPWVKASEIGGGTTVVKGPGFTGGDILRRTDGGAVGTIRANVNAPLTQQYRIRLRYASTTSFVVNLFVNNSAAGFTLPSTMAQNGSLTYESFNTLEVTHTIRFSQSDTTLRLNIFPSISGQEVYVDKLEIVPINPTREAEEDLEDAKKAVASLFTRTRDGLQVNVTDYQVDQAANLVSCLSDEQYGHDKKMLLEAVRAAKRLSRERNLLQDPDFNEINSTEENGWKASNGVTISEGGPFFKGRALQLASARENYPTYIYQKVDASTLKPYTRYKLDGFVQSSQDLEIDLIHHHKVHLVKNVPDNLVSDTYSDGSCSGINRCEEQHQVDVQLDAEDHPKDCCEAAQTHEFSSYIHTGDLNASVDQGIWVVLQVRTTDGYATLGNLELVEVGPLSGESLEREQRDNAKWNEEVGRKRAETDRIYQDAKQAINHLFVDYQDQQLSPEVGMADIIDAQNLIASISDVYSDAVLQIPGINYEMYTELSNRLQQASYLYTSRNVVQNGDFNSGLDSWNATTDTAVQQDGNMHFLVLSHWDAQVSQQFRVQPNCKYVLRVTAKKVGNGDGYVTIQDGAHHRETLTFNACDYDVNGTHVNDNSYITKELVFYPKTEHMWVEVSETEGTFYIDSIEFIETQE

SEQ ID NO: 514 - protein, 1150 aa, Bacillus thuringiensis ywc5-4
MNRNNPNEYEIIDAPYCGCPSDDDVRYPLASDPNAAFQNMNYKEYLQTYDGDYTGSLINPNLSINPRDVLQTGINIVGRILGFLGVPFAGQLVTFYTFLLNQLWPTNDNAVWEAFMAQIEELIDQKISAQVVRNALDDLTGLHDYYEEYLAALEEWLERPNGARANLVTQRFENLHTAFVTRMPSFGTGPGSQRDAVALLTVYAQAANLHLLLLKDAEIYGARWGLQQGQINLYFNAQQERTRIYTNHCVETYNRGLEDVRGTNTESWLNYHRFRREMTLMAMDLVALFPFYNVRQYPNGANPQLTREIYTDPIVYNPPANQGICRRWGNNPYNTFSELENAFIRPPHLFERLNRLTISRNRYTAPTTNSFLDYWSGHTLQSQHANNPTTYETSYGQITSNTRLFNTTNGARAIDSRARNFGNLYANLYGVSSLNIFPTGVMSEITNAANTCRQDLTTTEELPLENNNFNLLSHVTFLRFNTTQGGPLATLGFVPTYVWTREDVDFTNTITADRITQLPWVKASEIGGGTTVVKGPGFTGGDILRRTDGGAVGTIRANVNAPLTQQYRIRLRYASTTSFVVNLFVNNSAAGFTLPSTMAQNGSLTYESFNTLEVTHTIRFSQSDTTLRLNIFPSISGQEVYVDKLEIVPINPTREAEEDLEDAKKAVASLFTRTRDGLQVNVTDYQVDQAANLVSCLSDEQYGHDKKMLLEAVRAAKRLSRERNLLQDPDFNEINSTEENGWKASNGVTISEGGPFFKGRALQLASARENYPTYIYQKVDASTLKPYTRYKLGGFVQSSQDLEIDLIHHHKVHLVKNVPDNLVSGTYSDGSCSGINRCEEQHQVDVQLDAEDHPKDCCEAAQTHEFSSYIHTGDLNASVDQGIWVVLQVRTTDGYATLGNLELVEVGPLSGESLEREQRDNAKWNEEVGRKRAETDRIYQDAKQAINHLFVDYQDQQLSPEVGMADIIDAQNLIASISDVYSDAVLQIPGINYEMYTELSNRLQQASYLYTSRNVVQNGDFNSGLDSWNATTDTAVQQDGNMHFLVLSHWDAQVSQQFRVQPNCKYVLRVTAKKVGNGDGYVTIQDGAHHRETLTFNACDYDVNGTHVNDNSYITKELVFYPKTEHMWVEVSETEGTFYIDSIEFIETQE

SEQ ID NO: 515 - protein, 1150 aa, Bacillus thuringiensis
MNRNNPNEYDIIDAPYCGCPSDDDVRYPLASDPDAAFQNMNYKEYLQTYDGDYTGSLINPNLSINPRDVLQTGINIVGRILGFLGVPFAGQLVTFYTFLLNQLWPTNDNAVWEAFMAQIEELIDQKISAQVVRNALDDLTGLHDYYEEYLAALEEWLERPNGARANLVTQRFENLHTAFVTRMPSFGTGPGSQRDAVALLTVYAQAANLHLLLLKDAEIYGARWGLQQGQINLYFNAQQERTRIYTNHCVETYNRGLEDVRGTNTESWLNYHRFRREMTLMAMDLVALFPFYNVRQYPNGANPQLTREIYTDPIVYNPPANQGICRRWGNNPYNTFSELENAFIRPPHLFERLNRLTISRNRYTAPTTNSFLDYWSGHTLQSQHANNPTTYETSYGQITSNTRLFNTTNGARAIDSRARNFGNLYANLYGVSSLNIFPTGVMSEITNAANTCRQDLTTTEELPLENNNFNLLSHVTFLRFNTTQGGPLATLGFVPTYVWTREDVDFTNTITADRITQLPWVKASEIGGGTTVVKGPGFTGGDILRRTDGGAVGTIRANVNAPLTQQYRIRLRYASTTSFVVNLFVNNSAAGFTLPSTMAQNGSLTYESFNTLEVTHTIRFSQSDTTLRLNTSPSISGQEVYVDKLEIVPINPTREAEEDLEDAKKAVASLFTRTRDGLQVNVTDYQVDQAANLVSCLSDEQSGHDKKMLLEAVRAAKRLSRERNLLQDPDFNEINSTEENGWKASNGVTISEGGPFFKGRALQLASARENYPTYIYQKVDASTLKPYTRYKLDGFVQSSQDLEIDLIHHHKVHLVKNVPDNLVSDTHSDGSCSGINRCEEQHQVDVQLDAEDHPKDCCEAAQTHEFSSYIHTGDLNASVDQGIWVVLQVRTTDGYATLGNLELVEVGPLSGESLEREQRDNAKWNEEVGRKRAETDRIYQDAKQAINHLFVDYQDQQLSPEVGMADIIDAQNLIASISDVYSDAVLQIPGINYEMYTELSNRLQQASYLYTSRNVVQNGDFNSGLDSWNATTDTAVQQDGNMHFLVLSHWDAQVSQQFRVQPNCKYVLRVTAKKVGNGDGYVTIQDGAHHRETLTFNACDYDVNGTHVNDNSYITKELVFYPKTEHMWVEVSETEGTFYIDSIEFIETQE

SEQ ID NO: 516 - protein, 1150 aa, Bacillus thuringiensis 11
MNRNNPNEYEIIDAPYCGCPSDDDVRYPLASDPNAAFQNMNYKEYLQTYDGDYTGSLINPNLSINPRDVLQTGINIVGRILGFLGVPFAGQLVTFYTFLLNQLWPTNDNAVWEAFMAQIEELIDQKISAQVVRNALDDLTGLHDYYEEYLAALEEWLERPNGARANLVTQRFENLHTAFVTRMPSFGTGPGSQRDAVALLTVYAQAANLHLLLLKDAEIYGARWGLQQGQINLYFNAQQERTRIYTNHCVETYNRGLEDIRGTNTESWLNYHRFRREMTLMAMDLVALFPFYNVRQYPNGANPQLTREIYTDPIVYNPPANQGICRRWGNNPYNTFSELENAFIRPPHLFERLNRLTISRNRYTAPTTNSFLDYWPGHTLQSQHANNPTTYETSYGQITSNTRLFNTTNGARAIDSRARNFGNLYANLYGVSSLNIFPTGVMSEITNAANTCRQDLTTTEELPLENNNFNLLSHVTFLRFNTTQGGPLATLGFVPTYVWTREDVDFTNTITADRITQLPWVKASEIGGGTTVVKGPGFTGGDILRRTDGGAVGTIRANVNAPLTQQYRIRLRYASTTSFVVNLFVNNSAAGFTLPSTMAQNGSLTYESFNTLEVTHTIRFSQSDTTLRLNIFPSISGQEVYVDKLEIVPINPTREAEEDLEDAKKAVASLFTRTRDGLQVNVTDYQVDQAANLVSCLSDEQYGHDKKMLLEAVRAAKRLSRERNLLQDPDFNEINSTEENGWKASNGVTISEGGPFFKGRALQLASARENYPTYIYQKVDASTLKPYTRYKLDGFVQSSQDLEIDLIHHHKVHLVKNVPDNLVSDTYSDGSCSGINRCEEQHQVDVQLDAEDHPKDCCEAAQTHEFSSYIHTGDLNASVDQGIWVVLQVRTTDGYATLGNLELVEVGPLSGESLEREQRDNAKWNEEVGRKRAETDRIYQDAKRAINHLFVDYQDQQLSPEVGMADIIDAQNLIASISDVYSDAVLQIPGINYEMYTELSNRLQQASYLYTSRNVVQNGDFNSGLDSWNATTDTAVQQDGNMHFLVLSHWDAQVSQQFRVQPNCKYVLRVTAKKVGNGDGYVTIQDGAHHRETLTFNACDYDVNGTHVNDNSYITKELVFYPKTEHMWVEVSETEGTFYIDSIEFIETQE

SEQ ID NO: 517 - protein, 1150 aa, Bacillus thuringiensis 4
MNRNNPNEYEIIDASYCGCPSDDDVRYPLASDPNAAFQNMNYKEYLQTYDGDYTGSLINPNLSINPRDVLQTGINIVGRILGFLGVPFAGQLVTFYTFLLNQLWPTNDNAVWEAFMAQIEELIDQKISAQVVRNALDDLTGLHDYYEEYLAALEEWLERPNGARANLVTQRFENLHTAFVTRMPSFGTGPGSQRDAVALLTVYAQAANLHLLLLKDAEIYGARWGLQQGQINLYFNAQQERTRIYTNHCVETYNRGLEDVRGTNTESWLNYHRFRREMTLMAMDLVALFPFYNVRQYPNGANPQLTREIYTDPIVYNPPANQGICRRWGNNPYNTFSELENAFIRPPHLFERLNRLTISRNRYTAPTTNSFLDYWSGHTLQSQHANNPTTYETSYGQITSNTRLFNTTNGARAIDSRARNFGNLYANLYGVSSLNIFPTGVMSEITNAANTCRQDLTTTEELPLENNNFNLLSHVTFLRFNTTQGGPLATLGFVPTYVWTREDVDFTNTITADRITQLPWVKASEIGGGTTVVKGPGFTGGDILRRTDGGAVGTIRANVNAPLTQQYRIRLRYASTTSFVVNLFVNNSAAGFTLPSTMAQNGSLTYESFNTLEVTHTIRFSQSDTTLRLNIFPSISGQEVYVDKLEIVPINPTREAEEDLEDAKKAVASLFTRTRDGLQVNVTDYQVDQAANLVSWLSDEQYGHDKKMLLETVRAAKHLSRERNILLDPDFIEINSTEENGWKASNGVTIREGGPLFKGGALQLASARENYPTYIFQKVDASTLKPYTRYKLDGFVQSSQDLEIDLIHHHKVPLVKKVPDNLVFDTYFDGSCSGNNRCEGQHQVDVQLDAGGHPKGCCEAGQTHEFSSYIHTGDLNASVDQGIWVVLQVRTTDGYATLGNLELVEVGPLSGESLEREQRDNAKWNEEVGRKRAETDRIYQDAKQAINHLFVDYQDQQLSPEVGMADIIDAQNLIASISDVYSDAVLQIPGINYEMYTELSNRLQQASYLYTSRNVVQNGDFNSGLDSWNATTDTAVQQDGNMHFLVLSHWDAQVSQQFRVQPNCKYVLRVTAKKVGNGDGYVTIQDGAHHRETLTFNACDYDVNGTHVNDNSYITKELVFYPKTEHMWVEVSETEGTFYIDSIEFIETQE

SEQ ID NO: 518 - protein, 1152 aa, Bacillus thuringiensis
MNRNNQNDYEVIDASNCGCASDDVVQYPLARDPNAVFQNMHYKDYLQTYDGDYTGSFINPNLSINPRDVLQTGINIVGRLLGFLGVPFAGQLVTFYTFLLNQLWPTNDNAVWEAFMAQIEELINQRISEAVVGTAADHLTGLHDNYELYVEALEEWLERPNAARTNLLFNRFTTLDSLFTQFMPSFGTGPGSQNYAVPLLTVYAQAANLHLLLLKDAEIYGARWGLNQNQINSFHTRQQERTQYYTNHCVTTYNTGLDRLRGTNTESWLNYHRFRREMTLMAMDLVALFPYYNVRQYPNGANPQLTREIYTDPIVYNPPANQGICRRWGNNPYNTFSELENAFIRPPHLFDRLNRLTISRNRYTAPTTNSYLDYWSGHTLQSQYANNPTTYETSYGQITSNTRLFNTTNGANAIDSRARNFGNLYANLYGVSYLNIFPTGVMSEITSAPNTCWQDLTTTEELPLVNNNFNLLSHVTFLRFNTTQGGPLATVGFVPTYVWTRQDVDFNNIITPNRITQIPVVKAYELSSGATVVKGPGFTGGDVIRRTNTGGFGAIRVSVTGPLTQRYRIRFRYASTIDFDFFVTRGGTTINNFRFTRTMNRGQESRYESYRTVEFTTPFNFTQSQDIIRTSIQGLSGNGEVYLDRIEIIPVNPTREAEEDLEAAKKAVASLFTRTRDGLQVNVTDYQVDQAANLVSCLSDEQYAHDKKMLLEAVRAAKRLSRERNLLQDPDFNTINSTEENGWKASNGVTISEGGPFYKGRALQLASARENYPTYIYQKVDASELKPYTRYRLDGFVKSSQDLEIDLIHHHKVHLVKNVLDNLVSDTYPDDSCSGINRCEEQQMVNAQLETEHHHPMDCCEAAQTHEFSSYIDTGDLNSTVDQGIWVIFKVRTTDGYATLGNLELVEVGPLLGEPLEREQRENAKWNAELGRKRAETDRVYQDAKQSINHLFVDYQDQQLNPQIGMADIMDAQNLVASISDVYSDAVLQIPGINYEIYTELSNRLQQASYLYTSRNAVQNGDFNNGLDSWNATAGASVQQDGNTHFLVLSHWDAQVSQQFRVQPNCKYVLRVTAEKVGGGDGYVTIRDGAHHTETLTFNACDYDINGTYVTDNTYLTKEVIFYSHTEHMWVEVNETEGAFHIDSIEFVETEK

SEQ ID NO: 519 - protein, 1154 aa, Bacillus thuringiensis kurstaki DP1019
MNRNNQNEYEIIDGTNCDCSSDEVVKYPLASEQNGVLQNMNYKEYLQTYDGDYTGSLINPNLSINTRDVLQTGITIVGRVLGFLGVPFAGQLVTFYTFLLNQLWPTNNNAVWEAFMAQVEELIDQRISDQVVRNALDDLTGLHDYYNEYLAALEEWLDRPNGARANLAFQRFENLHTAFVTRMPSFGTGPGSQRDAVALLTVYAQAANLHLLLLKDAEIYGARWGLQQSQINLYFNAQQDRTRIYTNHCVATYNRGLEDLKGTNTESWYNYHQFRREMTLMAMDLVALFPYYNVRQYPNGANPQLTREIYTDPVVFNPPANQGLCRRWGNNPYMTFSGLENAFIRPPHLFDRLNSLTINSHRFPISSNFMDYWAGHTLRRSYMNNSAVQEDSYGAITPTRVTINPGVNGTNHIESTAVDFRSGLVGIYGVHRASFVPGGLFNGTISPANAGCRNLHDTRDVLPLEENNGSPSHRLSHVTFLSFQTNQAGSLANGGSVPLYVWARQDIDFNNTITANRITQLPLVKAFEIAAGTTIVKGPGFTGGDILRRTSTGTLGTIRVNVNSPLTQRYRVRFRYASTVDFDFFVSRGGTTVNNFRFPRTMSRGQESRYESYVTSEFTTPFTFTQSQDFIRTSIQGLSGNGEVYLDRIEIIPVNPAREAEEDLEAAKKAVASLFTRTRDGLQVNVTDYQVDQAANLVSCLSDEQYGHDKKMLLEAVRAAKRLSRERNLLQDPDFNEINSIEENGWKASNGVTISEGGPFFKGRALQLASARENYPTYIYQKVDASVLKPYTRYRLDGFVKSSQDLEIDLIHHHKVHLVKNVPDNLVSDTYSDGSCSGINRCDEQHQVDMQLDAEHHPMDCCEAAETHEFSSYIDTGDLNPSVDQGIWVVLKVRTTDGYATLGNLELVEVGSLSGESLEREKRENAEWNAELGRKRAETERVYQAAKRAINHLFVDYQDQQLNLEVGLAEINEVSNLVESIPSVYSDTVLQIPGVNYEIYTELSNRLQQASYLYMSRNAVQNGDFNNGLDSWNATTDATVQQDGTMHFLVLSHWDAQVSQPLRVQPNCKYVLRVTARKVGSGDGYVTIRNGAHHHETLIFNACDYDINGTYVNENTYITKEVVFYPHTEHTWVEVSESEGAFYIDSIELIETQE

SEQ ID NO: 520 - protein, 249 aa, Bacillus thuringiensis israelensis
MENLNHCPLEDIKVNPWKTPQSTARVITLRVEDPNEINNLLSINEIDNPNYILQAIMLANAFQNALVPTSTDFGDALRFSMPKGLEIANTITPMGAVVSYVDQNVTQTNNQVSVMINKVLEVLKTVLGVALSGSVIDQLTAAVTNTFTNLNTQKNEAWIFWGKETANQTNYTYNVLFAIQNAQTGGVMYCVPVGFEIKVSAVKEQVLFFTIQDSASYNVNIQSLKFAQPLVSSSQYPIADLTSAINGTL

SEQ ID NO: 521 - protein, 249 aa, Bacillus thuringiensis israelensis; identical to SEQ ID NO: 520

SEQ ID NO: 522 - protein, 249 aa, Bacillus thuringiensis LLP29
MENLNHCPLEDIKVNPWKTPQSKARVITLRVEDPNEINNLLSINEIDNPNYILQAIMLANAFQNALVPTSTDFGDALRFSMPKGLEIANTITPMGAVVSYVDQNVTQTNNQVSVMINKVLEVLKTVLGVALSGSVIDQLTAAVTNTFTNLNTQKNEAWIFWGKETANQTNYTYNVLFAIQNAQTGGVMYCVPVGFEIKVSAVKEQVLFFTIQDSASYNVNIQSLKFAQPLVSSSQYPIADLTSAINGTL

SEQ ID NO: 523 - protein, 131 aa, Bacillus thuringiensis LDC-9
MFFLLTKLIISNYILQAIMLANAFQNALVPTSTDFGDALRFSMPKGLEIANTITPMGAVVSYVDQNVTQTNNQVSVMINKVLEVLKTVLGVALSGSVIDQLTAAVTNTFTNLNTQKNEAWICWGKETANQT

SEQ ID NO: 524 - protein, 252 aa, Bacillus thuringiensis s. israelensis IPS82
MHLNNLNNFNNLENNGEYHCSGPIIKKPFRHIALTVPSSDITNFNEIFYVEPQYIAQAIRLTNTFQGAIDPLTLNFNFEKALQIANGLPNAGVTGTINQSVIHQTIEVSVMISQIKEIIRSVLGLVINSANFWNSVVSAITNTFTNLEPQVDENWIVWRNLSATQTSYFYKILFSIQNEDTGRFMAILPIAFEITVDVQKQQLLFITIKDSARYEVKMKALTVVQALDSYNAPIIDVFNVRNYSLHRPNHNI

SEQ ID NO: 525 - protein, 262 aa, Bacillus thuringiensis LLP29
MHLNNLNNFNNLENNGEYHCSAPIIKKPFRHIALTVPSSDITNFNEIFYVEPQYIAQAIRLTNTFQGAIDPLTLNFNFEKALQIANGLPNAGVTGTINQSVIHQTIEVSVMISQIKEIIRSVLGLVINSANFWNSVVSAITNTFTNLEPQVDENWIVWRNLSATQTSYFYKILFSIQNEDTGRFMAILPIAFEITVDVQKQQLLFITIKDSARYEVKMKALTVVQALDSYNAPIIDVFNVRNYSLHRPNHNILQNLNVNPIK

SEQ ID NO: 526 - protein, 156 aa, Bacillus thuringiensis israelensis PG14
NTFQGAIDPLTLNFNFEKALQIANGLPNAGVTGTINQSVIHQTIEVSVMISQIKEIIRSVLGLVINSANFWNRVVSAITNTFTNLEPQVDENWIVWRNLSATQTSYFYKILFSIQNEDTGRFMAILPIAFEITVDVQKQQLLFITIKDSARYEVKM

SEQ ID NO: 527 - protein, 156 aa, Bacillus thuringiensis morrisoni HD12
NTFQGAIDPLTLNFNFEKALQIANGLPNAGVTGTINQSVIHQTIEVSVMISQIKEIIRSVLGLVINSANFWNSVVSAITNTFTNLEPQVDENWIVWRNLSATQTSYFYKILFSIQNEDTGRFMAILPIAFEITVDVQKQQLLFITIKDSARYEVKM

SEQ ID NO: 528 - protein, 157 aa, Bacillus thuringiensis tenebrionis
NTFQGAIDPLTLNFNFEKALQIANGLPNAGVTGTINQSVIHQTIEVSVMISQIKEIIRSVLGLVINSANFWNSVVSAITNTFTNLEPQVDENWIVWRNLSATQTSYFYKILFSIQNEDTGRFMAILPIAFEITVDVQKQQLLFITIKDSARYEVKMK

SEQ ID NO: 529 - protein, 263 aa, Bacillus thuringiensis T36
MHLNNLNNFNNLENNGEYHRSGPIIKKPFRHIALTVPSSDITNFNEIFYVEPQYIAQAIRLTNTFQGAIDPLTLNFNFEKALQIANGLPNAGVTGTIIQSVIHQTIEVSVMISQIKEIIRSVLGLVINSANFWNSVVSAITNTFTNLEPQVDENWIVWRNLSATQTSYFYKILFSIQNEDTGRFMAILPIAFEITVDVQKQQLLFITIKDSARYEVKMKALTVVQALDSYNAPIIDVFNVRNYSLHRPNHNILQNLNVNPIKS

SEQ ID NO: 530 - protein, 119 aa, Bacillus thuringiensis LDC-9
LQIANGIPNAGVTGTINQSVIHQTIEVSVMISQIKEIIRSVLGLVINSANFWNSVVSAITNTFTNLEPQVDENWIVWRNLSATQTSYFYKILFSIQNEDTGRFMAILPIAFEITVDVGK

SEQ ID NO: 531 - protein, 260 aa, Bacillus thuringiensis medellin
MYINNFDFPEKNNDYQCSGPIIKKPFRHIALTVPSSDITNFNEIFYVEPQYIAQALRLTNTFQGAIDPLTLNFNFEKALQIANGLPNAGVTGTLNQSVIHQTIEISVMISQIKEIIRSVLGLVINSANFWNNVVSAITNTFTNLEPQVDENWIVWRNLSANQTSYYYKILFSIQNEDTGRFMAVLPIAFEINVDVHKQQLLFITIKDSARYEVKMKALTVVQALDSYNAPIIDVFNIHNYSLHRPNYHILQNLNVNPIKS

SEQ ID NO: 532 - protein, 138 aa, Bacillus thuringiensis serovar darmstadiensis
QIANGIPNAGVTGTINQSVIHQTIEVSVMISQIKEIIRSVLGLVINSANFWNSVVSAITNTFTNLEPQVDENWIVWRNLSATQTSYFYKILFSIQNEDTGRFMAILPIAFEITVDVQKQQLLFITIKDSARYAVTMKA

SEQ ID NO: 533 - protein, 231 aa, Bacillus thuringiensis
MFFNRVITLTVPSSDVVNYSEIYQVAPQYVNQALTLAKYFQGAIDGSTLRFDFEKALQIANDIPQAAVVNTLNQTVQQGTVQVSVMIDKIVDIMKNVLSIVIDNKKFWDQVTAAITNTFTNLNSQESERWIFYYKEDAHKTSYYYNILFAIQDEETGGVMATLPIAFDISVDIEKEKVLFVTIKDTENYAVTVKAINVVQALQSSRDSKVVDAFKSPRHLPRKRHKICSNS

SEQ ID NO: 534 - protein, 41 aa, Atrax robustus
GSQYCAPADQPCSLNTQPCCDDVTCTQERNENGHTAYYCRV

SEQ ID NO: 535 - protein, 98 aa, Hadronyche versuta
MKFSKLSLTLALILTQALFVLCGKINEDFMKNGLESQTLHDEIRKPIDSENPDTERLLDCLLDNRVCSSDRDCCGMTPSCTMGLCVPNVGGLVGGILG

SEQ ID NO: 536 - protein, 98 aa, Atrax robustus; identical to SEQ ID NO: 535

SEQ ID NO: 537 - protein, 98 aa, Hadronyche versuta
MKFSKLSLTLALILTQAIFVLCGKINEDFMKNDLESQALRDEIRKPIDSENPDTERLLDCLLDNRVCSSDKDCCGMTPSCTMGLCVPSVGGLVGGILG

SEQ ID NO: 538 - protein, 98 aa, Hadronyche versuta
MKFSKLSLTLALILTQAIFVLCGKINEDFMKNDLESHALHDEIRKPINSENPDTERLLDCLLDNRVCSSDKDCCGMTPSCTMGLCVPSVGGLVGGILG

SEQ ID NO: 539 - protein, 98 aa, Hadronyche versuta
MKFSKLSLTLALILTQALFVLCGKINEDFMKNGLESQALHDEIRKPIDSENPDTERLLDCLLDNRVCSSDKDCCGMTPSCTMGLCVPSVGGLVGGILG

SEQ ID NO: 540 - protein, 98 aa, Hadronyche versuta
MKFSKLSLTLALILTQVIFVLCGKINEDFMKNGLESQALHDEIRKPIDSENPDTERLLDCLLDNRVCSSDKDCCGMTPSCTMGLCVPSVGGLVGGILG

SEQ ID NO: 541 - protein, 93 aa, Hadronyche versuta
MKFSKLSLTLALILTQALFVLCDFMKNGLESQALHDEIRKSIDSENPDTERLLDCLLDNRVCSSDKDCCGMTPSCTMGLCVPSVGGLVGGILG

SEQ ID NO: 542 - protein, 98 aa, Atrax robustus
MKFSKLSLTLALILTQVLFVLCGKINEDFMKHGLESQALHDEIRKPIDSENPDTERLLDCLLDNRVCSSDKDCCGMTPSCTMGLCVPSVGGLVGGILG

SEQ ID NO: 543 - protein, 98 aa, Hadronyche versuta
MKFSKLSLTLALILTQAIFVLCGKINEDFMKNDLESQALHDEIRKPINSENPDTERLLDCLLDNRVCSSDKDCCGMTPSCTMGLCVPSVGGLVGGILG

SEQ ID NO: 544 - protein, 98 aa, Hadronyche versuta
MKFSKLSLTLALILTQALFVLCGKINEDFMKNGLESQALHDEIRKPIDSENPDTERLLDCLLDNRVCSSDRDCCGMTPSCTMGLCVPNVGGLVGDILG

SEQ ID NO: 545 - protein, 97 aa, Hadronyche versuta
MKFSKLSLTLALILTQVLFVLCGKIEDFMKNGLESQALHDEIRKPIDSENPDTERLLDCLLDNRVCSSDKDCCGMTPSCTMGLCVPNVGGLVGGILG

SEQ ID NO: 546 - protein, 93 aa, Hadronyche versuta
MKFSKLSLTLALILTQALFVLCDFMKNGLESQALHDEIRKPIDSENPDTERLLDCLLDNRVCSSDKDCCGMTPSCTMGLCVPNVGGLVGGILG

SEQ ID NO: 547 - protein, 98 aa, Hadronyche versuta
MKFSKLSLTLALILTQALFVLCGKINEDFMKNGLESQALHDEIRKPIDSENPDTERLLDCLLDNRICSSDKDCCGMTPSCTMGLCVPNVGGLVGGILG

SEQ ID NO: 548 - protein, 98 aa, Hadronyche versuta
MKFSKLSLTLALILTQALFVLCGKINEDFMKNGLESQALHDEIRKPIDSENPDTERLLDCLLDNRVCSSDKDCCGMTPSCTMGLCVPNVGGLVGGILG

SEQ ID NO: 549 - protein, 98 aa, Hadronyche versuta
MKFSKLSLTLALILTQAIFVLCGKINEDFMKNDLESQALHDEIRKPINSENPDTERLLDCLLDSRVCSSDKDCCGMTPSCTMGLCVPSVGGLVGGILG

SEQ ID NO: 550 - protein, 96 aa, Atrax robustus
MKFSKLSITLAVILTQAVFVFCGMTNEDFMEKGLESNELPDAIKKPVNSGKPDTKRLLDCVLSRMCFSNANCCGLTPPCKMGLCVPNVGGLLGGIL

SEQ ID NO: 551 - protein, 96 aa, Atrax robustus
MKFSKLSITLAVILTQAVFVFCGMTNEDFMEKGLESNELHDAIKKPVNSGKPDTERLLDCVLSRMCSSDANCCGLTPTCKMGLCVPNVGGLLGGIL

SEQ ID NO: 552 - protein, 101 aa, Hadronyche versuta
MKFSKLSLTLALILTQALFVLCGKINEDFMEHGLESHALHDEIRKPIDTEKADAERLVDCVVNTLGCSSDKDCCGMTPSCTLGICAPSVRGLVGGLLGRAL

SEQ ID NO: 553 - protein, 101 aa, Hadronyche versuta
MKFSKLSLTLALILTQALFVLCMKINEDFMENGLESHALHDEIRKPIDTEKADAERLVDCVVNTLGCSSDKDCCGMTPSCTLGICAPSVGGLVGGLLGRAL

SEQ ID NO: 554 - protein, 101 aa, Hadronyche versuta
MKFSKLSLTFALILTQALFVLCGKINEDFMDNGLESHALHDEIRKPIHTEKADAERLVDCVLNTLGCSSDKDCCGMTPSCTLGICAPSVGGLVGGLLGRAL

SEQ ID NO: 555 - protein, 101 aa, Hadronyche infensa
MKFSKLSLTLALILTQALFVLCGKINEDFMEHGLESHALHDEIRKPIDTEKADAERLVDCVVNTLGCSSDKDCCGMTPSCTLGICAPSVGGLVGGLLGRAL

SEQ ID NO: 556 - protein, 101 aa, Hadronyche infensa
MKFSKLSVTLALILTQTLLVLCGKINEDFMENGLESHALHDEIRKPIDTDKAYAERVLDCVVNTLGCSSDKDCCGMTPSCTLGICAPSVGGLVGGLLGRAL

SEQ ID NO: 557 - protein, 101 aa, Hadronyche versuta
MKFSKLSLTLALILTQALFVLCGKINEDFMENGLESHALHDEIRKPIDTEKADAERLVDCVVNTLGCSSDKDCCGMTPSCTLGICAPSVGGLVGGLLGRAL

SEQ ID NO: 558 - protein, 101 aa, Hadronyche versuta
MKFSKLSLTLALILTQALFVLCGKINEDFMENGLESHALHDEIRKPIDTEKADAERVLDCVVNTLGCSSDKDCCGMTPSCTLGICAPSVGGLVGGLLGRAL

SEQ ID NO: 559 - protein, 100 aa, Hadronyche versuta
MKFSKLSLTLALILTQALFVLCGKINEDFMENGLESHALHDEIRKPIDTEKADAERLVDCVVNTLGCSSDKDCCGMTPSCTLGICAPSVGLVGGLLGRAL

SEQ ID NO: 560 - protein, 97 aa, Atrax robustus
MKFSKLSITLAVILTQAVFVFCGMTNEDFMEKGFKSNDLQYAIKQPVNSGKPDTERLLDCVLSRVCSSDENCCGLTPTCTMGLCVPNVGGLLGGLLS

SEQ ID NO: 561 - protein, 97 aa, Atrax robustus
MKFSKLSITLVVILTQAVFVFCGMTNEDFMEKGFKSNDLQYAIRQPVNSGKPDTERLLDCVLSRVCSSDENCCGLTPTCTMGLCVPNVGGLLGGLLS

SEQ ID NO: 562 - protein, 101 aa, Hadronyche versuta
MKFSKLSLTLALILTQALLVLCGKINEDFMENGLESHALHDEIRKPLDTENPDTERQLDCVLNTLGCSSDKDCCGMTPSCTLGICAPNVGGLVGGLLGRAL

SEQ ID NO: 563 - protein, 101 aa, Hadronyche versuta
MKFSKLSLTLALILTQVLLVVCGKINEDFMENGLESHALHDEIRKPIDTEKADAERVLDCVVNTLGCSSDKDCCGMTPSCTLGICAPSVGGIVGGLLGRAL

SEQ ID NO: 564 - protein, 101 aa, Hadronyche versuta
MKFSKLSLTLALILAQAIFVLCGKINEDFMENGLESHALHDEIRKPIDTEKADAERVVDCVLNTLGCSSDKDCCGMTPSCTLGICAPSVGGLVGGLLGRAL

SEQ ID NO: 565 - protein, 101 aa, Hadronyche versuta
MKFSKLSLTLALILTQALLVVCGKINEDFMENGLESHALHDEIRKPIDTEKADAERVLDCVVNILGCSSDKDCCGMTPSCTLGICAPSVGGIVGGLLGRAL

SEQ ID NO: 566 - protein, 101 aa, Hadronyche versuta
MKFSKLSLTLALILTQALLVVCGKINEDFMENGLESHALHDEIRKPIDTEKADAERVLDCVVNTLGCSSDKDCCGMTPSCTLGICAPSVGGIVGGLLGRAL

SEQ ID NO: 567 - protein, 101 aa, Hadronyche infensa
MKFSKLSLTLALILTQALLVVCGKINEDFMENGLESHALHDEIRKSIDTEKADAERVLDCVVNTLGCSSDKDCCGMTPSCTLGICAPSVGGIVGGLLGRAL

SEQ ID NO: 568 - protein, 95 aa, Hadronyche versuta
MKFSKLSLTFALILTQTLLVLCDFMENGLESHALHDEIRKPIDTEKADAERVLDCVVNTLGCSSDKDCCGMTPSCTLGICAPSVGGLVGGLLGRA

SEQ ID NO: 569 - protein, 76 aa, Hadronyche versuta
MNTATGFIVLLVLATVLGGVEAGESHMRKDAMGRVRRQYCVPVDQPCSLNTQPCCDDATCTQERNENGHTVYYCRA

SEQ ID NO: 570 - protein, 39 aa, Hadronyche versuta; identical to SEQ ID NO: 12

SEQ ID NO: 571 - protein, 39 aa, Hadronyche versuta
GSCVPVDQPCSLNTQPCCDDATCTQERNENGHTVYYCRA

SEQ ID NO: 572 - protein, 75 aa, Hadronyche versuta
MNTATGFIVLLVLATILGGIEAGESHMRKDAMGRVRRQYCVPVDQPCSLNTQPCCDDATCTQERNENGHTVYYCR

SEQ ID NO: 573 - protein, 38 aa, Hadronyche versuta
QYCVPVDQPCSLNTQPCCDDATCTQERNENGHTVYYCR

SEQ ID NO: 574 - protein, 75 aa, Hadronyche versuta
MNTATGFIVLLVLATVLGGIEAGESHMRKDAMGRVRRQYCVPVDQPCSLNTQPCCDDATCTQELNENDNTVYYCR

SEQ ID NO: 575 - protein, 38 aa, Hadronyche versuta
QYCVPVDQPCSLNTQPCCDDATCTQELNENDNTVYYCR

SEQ ID NO: 576 - protein, 76 aa, Hadronyche versuta
MNTATGFIVLLVLATILGGIEAGESHMRKDAMGRVRRQYCVPVDQPCSLNTQPCCDDATCTQERNENGHTVYYCRA

SEQ ID NO: 577 - protein, 39 aa, Hadronyche versuta; identical to SEQ ID NO: 12

SEQ ID NO: 578 - protein, 76 aa, Hadronyche versuta
MNTATGFIVLLVLATVLGGIEAGESHMRKDAMGRVRRQYCVPVDQPCSLNTQPCCDDATCTQELNENANPVYYCRA

SEQ ID NO: 579 - protein, 39 aa, Hadronyche versuta; identical to SEQ ID NO: 6

SEQ ID NO: 580 - protein, 76 aa, Hadronyche versuta
MNTTTGFIVLLVLATILGGIEAGESHMRKDAMGRVRRQYCVPVDQPCSLNTQPCCDDATCTQELNENDNTVYYCRA

SEQ ID NO: 581 - protein, 39 aa, Hadronyche versuta
QYCVPVDQPCSLNTQPCCDDATCTQELNENDNTVYYCRA

SEQ ID NO: 582 - protein, 76 aa, Hadronyche versuta
MNTATGFIVLLVLATVLGGIEAGESHMRKDAMGRVRRQYCVPVDQPCSLNTQPCCDDATCTQELNENDNTVYYCRA

SEQ ID NO: 583 - protein, 39 aa, Hadronyche versuta; identical to SEQ ID NO: 581

SEQ ID NO: 584 - protein, 76 aa, Hadronyche versuta
MNTATGFIVFLVLATVLGGIEAGESHMRKDAMGRVRRQYCVPVDQPCSLNTQPCCDDATCTQELNENDNTVYYCRA

SEQ ID NO: 585 - protein, 39 aa, Hadronyche versuta; identical to SEQ ID NO: 581

SEQ ID NO: 586 - protein, 76 aa, Hadronyche versuta
MNTATGFIVLLVLATVLGGIEARESHMRKDAMGRVRRQYCVPVDQPCSLNTQPCCDDATCTQELNENDNTVYYCRA

SEQ ID NO: 587 - protein, 39 aa, Hadronyche versuta; identical to SEQ ID NO: 581

SEQ ID NO: 588 - protein, 37 aa, Hadronyche versuta; identical to SEQ ID NO: 24

SEQ ID NO: 589 - protein, 45 aa, Hadronyche versuta
LLACLFGNGRCSSNRDCCELTPVCKRGSCVSSGPGLVGGILGGIL

SEQ ID NO: 590 - protein, 19 aa, Hadronyche versuta
EDTRADLQGGEAAEKVFRR

SEQ ID NO: 591 - protein, 15 aa, Hadronyche versuta
GESHVREDAMGRARR

SEQ ID NO: 592 - protein, 78 aa, Atrax robustus
MNTATGVIALLVLATVIGCIEAEDTRADLQGGEAAEKVFRRSPTCIPSGQPCPYNENCCSQSCTFKENENGNTVKRCD

SEQ ID NO: 593 - protein, 37 aa, Atrax robustus; identical to SEQ ID NO: 24

SEQ ID NO: 594 - protein, 78 aa, Atrax robustus
MNTATGVIALLVLVTVIGCIEAEDTRADLQGGEAAEKVFRRSPTCIPSGQPCPYNENCCSQSCTFKENENGNTVKRCD

SEQ ID NO: 595 - protein, 37 aa, Atrax robustus; identical to SEQ ID NO: 24

SEQ ID NO: 596 - protein, 78 aa, Atrax robustus
MNTATGVIALLVLATVIGCIEAEDTRADLQGGEAAEKVFRRSPTCIPSGQPCPYNENCCSQSCTFKENETGNTVKRCD

SEQ ID NO: 597 - protein, 37 aa, Atrax robustus
SPTCIPSGQPCPYNENCCSQSCTFKENETGNTVKRCD

SEQ ID NO: 598 - protein, 78 aa, Atrax robustus
MNTATGVIALLVLATVIGCIEAEDTRADLQGGEAAEKVFRRSPTCIPSGQPCPYNENCCSQSCTFKENENANTVKRCD

SEQ ID NO: 599 - protein, 37 aa, Atrax robustus
SPTCIPSGQPCPYNENCCSQSCTFKENENANTVKRCD

SEQ ID NO: 600 - protein, 78 aa, Atrax robustus
MNTATGVIALLVLATVIGCIEAEDTRADLQGGEAAEKVFRRSPTCIPSGQPCPYNENCCSKSCTYKENENGNTVQRCD

SEQ ID NO: 601 - protein, 37 aa, Atrax robustus
SPTCIPSGQPCPYNENCCSKSCTYKENENGNTVQRCD

SEQ ID NO: 602 - protein, 73 aa, Atrax robustus
MNTATGFIVLLVLATVLGCIEAGESHVREDAMGRARRGACTPTGQPCPYNESCCSGSCQEQLNENGHTVKRCV

SEQ ID NO: 603 - protein, 36 aa, Atrax robustus
GACTPTGQPCPYNESCCSGSCQEQLNENGHTVKRCV

SEQ ID NO: 604 - protein, 79 aa, Hadronyche versuta
MNTATGFIVLLVLATVIGCISADFQGGFEPYEGEDAERIFRRSPTCIPTGQPCPYNENCCSQSCTYKANENGNQVKGCD

SEQ ID NO: 605 - protein, 37 aa, Hadronyche versuta
SPTCIPTGQPCPYNENCCSQSCTYKANENGNQVKGCD

SEQ ID NO: 606 - protein, 79 aa, Hadronyche versuta
MNTATGFIVLLVLATVIGCISADFQGGFEPYEEEDAERIFRRSPTCIPTGQPCPYNENCCNQSCTYKANENGNQVKRCD

SEQ ID NO: 607 - protein, 37 aa, Hadronyche versuta
SPTCIPTGQPCPYNENCCNQSCTYKANENGNQVKRCD

SEQ ID NO: 608 - protein, 79 aa, Hadronyche versuta
MNTATGFIVLLVLATVIGCISADFQGGFEPYEEEDAERIFRRSPTCIPTGQPCPYNENCCSQSCTYKANENGNQVKRCD

SEQ ID NO: 609 - protein, 37 aa, Hadronyche versuta
SPTCIPTGQPCPYNENCCSQSCTYKANENGNQVKRCD

SEQ ID NO: 610 - protein, 79 aa, Hadronyche versuta
MNTATGFIVLLVLATVIGCISVDFQGGFESYEEEDAERIFRRSPTCIPTGQPCPYNENCCSQSCTYKANENGNQVKRCD

SEQ ID NO: 611 - protein, 37 aa, Hadronyche versuta; identical to SEQ ID NO: 609

SEQ ID NO: 612 - protein, 78 aa, Hadronyche versuta
MNTATGFIVLLVLATVIGCISADFQGGFESSVEDAERLFRRSSTCIRTDQPCPYNESCCSGSCTYKANENGNQVKRCD

SEQ ID NO: 613 - protein, 37 aa, Hadronyche versuta
SSTCIRTDQPCPYNESCCSGSCTYKANENGNQVKRCD

SEQ ID NO: 614 - protein, 78 aa, Hadronyche versuta
MNTATGFIVLLVLATVIGCISADFQGGFEPYEEEDAERIFRRSTCTPTDQPCPYHESCCSGSCTYKANENGNQVKRCD

SEQ ID NO: 615 - protein, 36 aa, Hadronyche versuta
STCTPTDQPCPYHESCCSGSCTYKANENGNQVKRCD

SEQ ID NO: 616 - protein, 78 aa, Hadronyche versuta
MNTATGFIVLLVLATVIGCISADFEGSFEPYEEEDAERIFRRSTCTPTDQPCPYDESCCSGSCTYKANENGNQVKRCD

SEQ ID NO: 617 - protein, 36 aa, Hadronyche versuta
STCTPTDQPCPYDESCCSGSCTYKANENGNQVKRCD

SEQ ID NO: 618 - protein, 78 aa, Hadronyche versuta
MNTATGFIVLLVLATVIGCISADFQGSFEPYEEEDAERIFRRSTCTPTDQPCPYDESCCSGSCTYKANENGNQVKRCD

SEQ ID NO: 619 - protein, 36 aa, Hadronyche versuta; identical to SEQ ID NO: 617

SEQ ID NO: 620 - protein, 78 aa, Hadronyche versuta
MNTATGFIVLLVLATVIGCISADFQGSFEPYEEEDAERIFRRSTCTPTDQPCPYHESCCSGSCTYKANENGNQVKRCD

SEQ ID NO: 621 - protein, 36 aa, Hadronyche versuta; identical to SEQ ID NO: 615

SEQ ID NO: 622 - protein, 78 aa, Hadronyche versuta
MNTATGFIVLLVLATVIGCISADFQGGFEPYEEEDAERIFRRSTCTPTDQPCPYDESCCSGSCTYKANENGNQVKRCD

SEQ ID NO: 623 - protein, 36 aa, Hadronyche versuta; identical to SEQ ID NO: 617

SEQ ID NO: 624 - protein, 36 aa, Atrax infensus; identical to SEQ ID NO: 615

SEQ ID NO: 625 - protein, 37 aa, Atrax infensus; identical to SEQ ID NO: 609

SEQ ID NO: 626 - protein, 37 aa, Atrax infensus; identical to SEQ ID NO: 613

SEQ ID NO: 627 - protein, 37 aa, Atrax robustus
SSVCIPSGQPCPYNEHCCSGSCTYKENENGNTVQRCD

SEQ ID NO: 628 - protein, 37 aa, Hadronyche versuta; identical to SEQ ID NO: 24

SEQ ID NO: 629 - protein, 37 aa, Atrax formidabillis
SPTCTGADRPCAACCPCCPGTSCKGPEPNGVSYCRND

SEQ ID NO: 630 - protein, 36 aa, Atrax formidabillis
SPTCTGADRPCAACCPCCPGTSCKGPEPNGVSYCRN

SEQ ID NO: 631 - protein, 37 aa, Atrax formidabillis
SPTCIRSGQPCPYNENCCSQSCTFKTNENGNTVKRCD

SEQ ID NO: 632 - protein, 9 aa, Atrax infensus
NGNQVKRCD

SEQ ID NO: 633 - protein, 9 aa, Atrax infensus
NGNQVKRCD

SEQ ID NO: 634 - protein, 9 aa, Hadronyche versutus
NGNTVKRCD

SEQ ID NO: 635 - protein, 15 aa, Hadronyche versutus
SPTCIPSGQPCPYNE

SEQ ID NO: 636 - protein, 16 aa, Agelenopsis aperta
ECVPENGHCRDWYDEC

SEQ ID NO: 637 - protein, 37 aa, Agelenopsis aperta
ECATKNKRCADWAGPWCCDGLYCSCRSYPGCMCRPSS

SEQ ID NO: 638 - protein, 38 aa, Agelenopsis aperta
ADCVGDGQRCADWAGPYCCSGYYCSCRSMPYCRCRSDS

SEQ ID NO: 639 - protein, 37 aa, Agelenopsis aperta
ACVGENQQCADWAGPHCCDGYYCTCRYFPKCICRNNN

SEQ ID NO: 640 - protein, 37 aa, Agelenopsis aperta
ACVGENKQCADWAGPHCCDGYYCTCRYFPKCICRNNN

SEQ ID NO: 641 - protein, 37 aa, Agelenopsis aperta
DCVGESQQCADWAGPHCCDGYYCTCRYFPKCICVNNN

SEQ ID NO: 642 - protein, 36 aa, Hololena curta
SCVGEYGRCRSAYEDCCDGYYCNCSQPPYCLCRNNN

SEQ ID NO: 643 - protein, 38 aa, Hololena curta
ADCVGDGQKCADWFGPYCCSGYYCSCRSMPYCRCRSDS

SEQ ID NO: 644 - protein, 70 aa, Androctonus australis Hector
KKNGYAVDSSGKAPECLLSNYCNNQCTKVHYADKGYCCLLSCYCFGLNDDKKVLEISDTRKSYCDTTIIN

SEQ ID NO: 645 - protein, 70 aa, Androctonus australis Hector
KKNGYAVDSSGKAPECLLSNYCNNECTKVHYADKGYCCLLSCYCFGLNDDKKVLEISDTRKSYCDTTIIN

SEQ ID NO: 646 - protein, 70 aa, Androctonus australis Hector
KKDGYAVDSSGKAPECLLSNYCYNECTKVHYADKGYCCLLSCYCFGLNDDKKVLEISDTRKSYCDTPIIN

SEQ ID NO: 647 - protein, 33 aa, Scorpio maurus palmatus
ALPLSGEYEPCVRPRKCKPGLVCNKQQICVDPK

SEQ ID NO: 648 - protein, 61 aa, Leiurus quinquestriatus
DGYIRKRDGCKLSCLFGNEGCNKECKSYGGSYGYCWTWGLACWCEGLPDEKTWKSETNTCG

SEQ ID NO: 649 - protein, 61 aa, Buthotus judaicus
DGYIRKKDGCKVSCIIGNEGCRKECVAHGGSFGYCWTWGLACWCENLPDAVTWKSSTNTCG

SEQ ID NO: 650 - protein, 39 aa, Atrax robustus
GSSPTCIPSGQPCPYNENCCSQSCTFKENENGNTVKRCD

SEQ ID NO: 651 - protein, 39 aa, Atrax robustus
GSAICTGADRPCAACCPCCPGTSCKAESNGVSYCRKDEP

SEQ ID NO: 652 - protein, 41 aa, Atrax robustus; identical to SEQ ID NO: 5

SEQ ID NO: 653 - protein, 60 aa, Hadronyche versuta
MNTATGFIVLLVLATVLGGVEAGESHMRKDAMGRVRRQYCVPVDQPCSLNTQPCCDDATC

SEQ ID NO: 654 - protein, 39 aa, Hadronyche versuta
QYCVPVDQPCSLNTQPCCDDAYCTQERNENGHTVYYCRA

SEQ ID NO: 655 - protein, 39 aa, Hadronyche versuta; identical to SEQ ID NO: 571

SEQ ID NO: 656 - protein, 74 aa, Hadronyche versuta
MNTATGFIVLLVLATILGGIEAGESHMRKDAMGRVRRQYCVPVDQPCSLNTQPCCDDATCTERNENGHTVYYCR

SEQ ID NO: 657 - protein, 38 aa, Hadronyche versuta; identical to SEQ ID NO: 573

SEQ ID NO: 658 - protein, 75 aa, Hadronyche versuta
MNTATGFIVLLVLATVLGGIEAGESHMRKDAMGRVRRQYCVPVDQPCSLNTQPCCDDAYCTQELNENDNTVYYCR

SEQ ID NO: 659 - protein, 38 aa, Hadronyche versuta; identical to SEQ ID NO: 575

SEQ ID NO: 660 - protein, 76 aa, Hadronyche versuta; identical to SEQ ID NO: 576

SEQ ID NO: 661 - protein, 39 aa, Hadronyche versuta; identical to SEQ ID NO: 12

SEQ ID NO: 662 - protein, 76 aa, Hadronyche versuta; identical to SEQ ID NO: 578

SEQ ID NO: 663 - protein, 39 aa, Hadronyche versuta; identical to SEQ ID NO: 6

SEQ ID NO: 664 - protein, 76 aa, Hadronyche versuta
MNTTTGFIVLLVLATILGGIEAGESHMRKDAMGRVRRQYCVPVDQPCSLNTQPCCDDAYCTQELNENDNTVYYCRA

SEQ ID NO: 665 - protein, 39 aa, Hadronyche versuta; identical to SEQ ID NO: 581

SEQ ID NO: 666 - protein, 76 aa, Hadronyche versuta; identical to SEQ ID NO: 582

SEQ ID NO: 667 - protein, 39 aa, Hadronyche versuta; identical to SEQ ID NO: 581

SEQ ID NO: 668 - protein, 76 aa, Hadronyche versuta; identical to SEQ ID NO: 584

SEQ ID NO: 669 - protein, 39 aa, Hadronyche versuta; identical to SEQ ID NO: 581

SEQ ID NO: 670 - protein, 76 aa, Atrax robustus; identical to SEQ ID NO: 586

SEQ ID NO: 671 - protein, 39 aa, Atrax robustus; identical to SEQ ID NO: 581

SEQ ID NO: 672 - protein, 22 aa, Hadronyche versuta
  MISC_FEATURE (4)..(4): Xaa is Ala, Arg, Asn, Asp, Asx, Cys, Glu, Gln, Glx, Gly, His, Ile, Leu, Lys, Met, Phe, Pro, Ser, Thr, Trp, Tyr, or Val.
  MISC_FEATURE (10)..(10): Xaa is Ala, Arg, Asn, Asp, Asx, Cys, Glu, Gln, Glx, Gly, His, Ile, Leu, Lys, Met, Phe, Pro, Ser, Thr, Trp, Tyr, or Val.
  MISC_FEATURE (16)..(16): Xaa is Ala, Arg, Asn, Asp, Asx, Cys, Glu, Gln, Glx, Gly, His, Ile, Leu, Lys, Met, Phe, Pro, Ser, Thr, Trp, Tyr, or Val.
  MISC_FEATURE (20)..(20): Xaa is Ala, Arg, Asn, Asp, Asx, Cys, Glu, Gln, Glx, Gly, His, Ile, Leu, Lys, Met, Phe, Pro, Ser, Thr, Trp, Tyr, or Val.
MNTXTGFIVXLVLATXLGGXEA

SEQ ID NO: 673 - protein, 15 aa, Hadronyche versuta
  MISC_FEATURE (1)..(1): Xaa is Ala, Arg, Asn, Asp, Asx, Cys, Glu, Gln, Glx, Gly, His, Ile, Leu, Lys, Met, Phe, Pro, Ser, Thr, Trp, Tyr, or Val.
XESHMRKDAMGRVRR

SEQ ID NO: 674 - protein, 64 aa, Leiurus quinquestriatus hebraeus
VRDAYIAKNYNCVYECFRDAYCNELCTKNGASSGYCQWAGKYGNACWCYALPDNVPIRVPGKCR

SEQ ID NO: 675 - protein, 64 aa, Leiurus quinquestriatus quinquestriatus
VRDAYIAKNYNCVYECFRDSYCNDLCTKNGASSGYCQWAGKYGNACWCYALPDNVPIRVPGKCH

SEQ ID NO: 676 - protein, 65 aa, Bothus occitanus tunetanus
VRDAYIAQNYNCVYFCMKDDYCNDLCTKNGASSGYCQWAGKYGNACWCYALPDNVPIRIPGKCHS

SEQ ID NO: 677 - protein, 64 aa, Hottentotta judaica
GRDAYALDNLNCAYTCGSKSYCNTECTKNGAVSGYCQWLGKYGNACWCINLPDKVPIRIPGACR

SEQ ID NO: 678 - protein, 67 aa, Leiurus quinquestriatus hebraeus
VRDGYIAQPENCVYHCFPGSSGCDTLCKEKGGTSGHCGFKVGHGLACWCNALPDNVGIIVEGEKCHS

SEQ ID NO: 679 - protein, 66 aa, Buthus occitanus mardochei
GRDGYIAQPENCVYHCFPGSSGCDTLCKEKGATSGHCGFLPGSGVACWCDNLPNKVPIVVGGEKCH

SEQ ID NO: 680 - protein, 65 aa, Buthus occitanus mardochei
GRDAYIAQPENCVYECAKNSYCNDLCTKNGAKSGYCQWLGKYGNACWCEDLPDNVPIRIPGKCHF

SEQ ID NO: 681 - protein, 64 aa, Bothus martensii Karsch
VRDAYIAKPHNCVYECARNEYCNDLCTKNGAKSGYCQWVGKYGNGCWCIELPDNVPIRVPGKCH

SEQ ID NO: 682 - protein, 64 aa, Bothus martensii Karsch
VRDAYIAKPHNCVYSCARNEWCNDLCTKNGAKSGYCQWVGKYGNGCWCIELPDNVPIRVPGKCH

SEQ ID NO: 683 - protein, 64 aa, Bothus martensii Karsch
VRDAYIAKPENCVYHCAGNEGCNKLCTDNGAESGYCQWGGRYGNACWCIKLPDDVPIRVPGKCH

SEQ ID NO: 684 - protein, 66 aa, Bothus martensii Karsch
VRDGYIALPHNCAYGCLNNEYCNNLCTKDGAKIGYCNIVGKYGNACWCIQLPDNVPIRVPGRCHPA

SEQ ID NO: 685 - protein, 64 aa, Leiurus quinquestriatus
VRDGYIAQPENCVYHCIPDCDTLCKDNGGTGGHCGFKLGHGIACWCNALPDNVGIIVDGVKCHK

SEQ ID NO: 686 - protein, 66 aa, Leiurus quinquestriatus
VRDGYIAKPENCAHHCFPGSSGCDTLCKENGGTGGHCGFKVGHGTACWCNALPDKVGIIVDGVKCH

SEQ ID NO: 687 - protein, 66 aa, Centruroides noxius
KEGYLVDIKNTGCKYECLKLGDNDYCLRECKQQYGKGAGGYCYAFACWCTHLYEQAIVWPLPNKRC

SEQ ID NO: 688 - protein, 66 aa, Centruroides noxius
KEGYLVELGTGCKYECFKLGDNDYCLRECKARYGKGAGGYCYAFGCWCTQLYEQAVVWPLKNKTCR

SEQ ID NO: 689 - protein, 66 aa, Centruroides suffusus suffusus
KEGYLVSKSTGCKYECLKLGDNDYCLRECKQQYGKSSGGYCYAFACWCTHLYEQAVVWPLPNKTCN

SEQ ID NO: 690 - protein, 66 aa, Centruroides suffusus suffusus
KEGYLVNSYTGCKFECFKLGDNDYCLRECRQQYGKGSGGYCYAFGCWCTHLYEQAVVWPLPNKTCN

SEQ ID NO: 691 - protein, 76 aa, Buthotus judaicus
KKNGYPLDRNGKTTECSGVNAIAPHYCNSECTKVYVAESGYCCWGACYCFGLEDDKPIGPMKDITKKYCDVQIIPS

SEQ ID NO: 692 - protein, 70 aa, Androctonus australis Hector; identical to SEQ ID NO: 645

SEQ ID NO: 693 - protein, 70 aa, Leiurus quinquestriatus quinquestriatus
KKNGYAVDSSGKAPECLLSNYCYNECTKVHYADKGYCCLLSCYCVGLSDDKKVLEISDARKKYCDFVTIN

SEQ ID NO: 694 - protein, 70 aa, Leiurus quinquestriatus hebraeus
KKNGFAVDSNGKAPECFFDHYCNSECTKVYYAEKGYCCLLSCYCFGLNDDKKVLEISDTTKKYCDFTIIN

SEQ ID NO: 695 - protein, 72 aa, Bothus martensii Karsch
KKNGYAVDSSGKVAECLFNNYCNNECTKVYYADKGYCCLLKCYCFGLLDDKPVLDIWDSTKNYCDVQIIDLS

SEQ ID NO: 696 - protein, 61 aa, Leiurus quinquestriatus hebraeus
DGYIKRRDGCKVACLIGNEGCDKECKAYGGSYGYCWTWGLACWCEGLPDDKTWKSETNTCG

SEQ ID NO: 697 - protein, 60 aa, Leiurus quinquestriatus hebraeus
DGYIRGDGCKVSCVINHVFCDNECKAAGGSYGYCWAWGLACWCEGLPAEREWKYETNTCG

SEQ ID NO: 698 - protein, 62 aa, Buthotus judaicus
DGYIRKKDGCKVSCIIGNEGCRKECVAHGGSFGYCWTWGLACWCENLPDAVTWKSSTNTCGR

SEQ ID NO: 699 - protein, 61 aa, Buthacus arenicola
DGYIRRRDGCKVSCLFGNEGCDKECKAYGGSYGYCWTWGLACWCEGLPDDKTWKSETNTCG

SEQ ID NO: 700 - protein, 61 aa, Leiurus quinquestriatus quinquestriatus
DGYIRKRDGCKLSCLFGNEGCNKECKSYGGSYGYCWTWGLACWCEGLPDDKTWKSETNTCG

SEQ ID NO: 701 - protein, 60 aa, Bothus occitanus tunetanus
DGYIKGYKGCKITCVINDDYCDTECKAEGGTYGYCWKWGLACWCEDLPDEKRWKSETNTC

SEQ ID NO: 702 - protein, 63 aa, Leiurus quinquestriatus hebraeus
DNGYLLNKATGCKVWCVINNASCNSECKLRRGNYGYCYFWKLACYCEGAPKSELWAYATNKCN

SEQ ID NO: 703 - protein, 62 aa, Tityus serrulatus
KEGYLMDHEGCKLSCFIRPSGYCGRECGIKKGSSGYCYAWPACYCYGLPNWVKVWDRATNKC

SEQ ID NO: 704 - protein, 64 aa, Tityus zulianus
KDGYLVGNDGCKYSCFTRPGTYCANECSRVKGKDGYCYAWMACYCYSMPNWVKTWDRATNRCGR

SEQ ID NO: 705 - protein, 29 aa, Oldenlandia affinis
GLPVCGETCVGGTCNTPGCTCSWPVCTRN

SEQ ID NO: 706 - protein, 29 aa, Oldenlandia affinis
CGETCFGGTCNTPGCSCTWPICTRDGLPV

SEQ ID NO: 707 - protein, 30 aa, Oldenlandia affinis
GTPCGESCVYIPCISGVIGCSCTDKVCYLN

SEQ ID NO: 708 - protein, 10 aa, Artificial Sequence
  Synthetically Created Peptide
YDPAPPPPPP

SEQ ID NO: 709 - protein, 20 aa, Artificial Sequence
  Synthetically Created Peptide
HHHHHHIEGRYDPAPPPPPP

SEQ ID NO: 710 - protein, 8 aa, Artificial Sequence
  Synthetically created peptide
YDPAPPPP

SEQ ID NO: 711 - protein, 6 aa, Artificial Sequence
  Synthetically Created Peptide
YDPAPP

SEQ ID NO: 712 - protein, 5 aa, Artificial Sequence
  Synthetically Created Peptide
YDPAP

SEQ ID NO: 713 - protein, 6 aa, Artificial Sequence
  Synthetically Created Peptide
YDPAPR

SEQ ID NO: 714 - protein, 4 aa, Artificial Sequence
  Synthetically Created Peptide
YDPA

SEQ ID NO: 715 - protein, 5 aa, Artificial Sequence
  Synthetically Created Peptide
YDPAR

SEQ ID NO: 716 - protein, 20 aa, Artificial Sequence
  Synthetically Created Peptide
YDPARYDPARYDPARYDPAR

SEQ ID NO: 717 - protein, 4 aa, Artificial Sequence
  Synthetically Created Peptide
YDPR

SEQ ID NO: 718 - protein, 4 aa, Artificial Sequence
  Synthetically Created Peptide
DPAR

SEQ ID NO: 719 - protein, 16 aa, Artificial Sequence
  Synthetically Created Peptide
DPARDPARDPARDPAR

SEQ ID NO: 720 - protein, 9 aa, Artificial Sequence
  Synthetically Created Peptide
DPAPPPPPP

SEQ ID NO: 721 - protein, 8 aa, Artificial Sequence
  Synthetically Created Peptide
PAPPPPPP

SEQ ID NO: 722 - protein, 33 aa, Scorpio Maurus
GDCLPHLKLCKENKDCCSKKCKRRGTNIEKRCR

SEQ ID NO: 723 - protein, 64 aa, Mesobuthus eupeus
MSTFVVVFLLLTAILCHAEHAIDETARGCNRLNKKCNSDADCCRYGERCISTGVNYYCRPDVGP

SEQ ID NO: 724 - protein, 85 aa, Atrax robustus
MNTATGFIVLLVLATVLGAIEAEDAVPDFEGGFASHAREDTVGGKIRRSSVCIPSGQPCPYNEHCCSGSCTYKENENGNTVQRCD

SEQ ID NO: 725 - protein, 73 aa, Atrax robustus; identical to SEQ ID NO: 602

SEQ ID NO: 726 - protein, 78 aa, Atrax robustus; identical to SEQ ID NO: 592

SEQ ID NO: 727 - protein, 78 aa, Atrax robustus; identical to SEQ ID NO: 600

SEQ ID NO: 728 - protein, 78 aa, Atrax robustus; identical to SEQ ID NO: 596

SEQ ID NO: 729 - protein, 29 aa, Grammostola rosea
YCQKWLWTCDSERKCCEDMVCRLWCKKRL

SEQ ID NO: 730 - protein, 31 aa, Grammostola rosea
YCQKWMWTCDEERKCCEGLVCRLWCKKKIEW

SEQ ID NO: 731 - protein, 32 aa, Ctenus ornatus
APCTYPGQQCKSDDECCHGTCKTAFIGRICMR

SEQ ID NO: 732 - protein, 86 aa, Chilobrachys jingzhao
MKVSVLITLAVLGVMFVWASAAELEERGSDQRDSPAWLKSMERIFQSGERECRKMFGGCSVDSDCCAHLGCKPTLKYCAWDGTFGK

SEQ ID NO: 733 - protein, 29 aa, Chilobrachys jingzhao
YCQKWMWTCDSERKCCEGYVCELWCKYNL

SEQ ID NO: 734 - protein, 62 aa, Chilobrachys jingzhao
MKTSILFVIFSLALLFALSAATEIEETDRACGQFWWKCGEGKPPCCANFACKIGLYLCIWSP

SEQ ID NO: 735 - protein, 63 aa, Chilobrachys jingzhao
MKNTSILFILGLALLLVLAFEAQVGESDGECGGFWWKCGRGKPPCCKGYACSKTWGWCAVEAP

SEQ ID NO: 736 - protein, 83 aa, Chilobrachys jingzhao
MKASVFAVILGLVVLCACSFAEDEQDQFVSPNELLKSMFVESRHEFTPEVEGRYCQKWMWTCDSKRACCEGLRCKLWCRKIIG

SEQ ID NO: 737 - protein, 31 aa, Grammostola rosea
YCQKWMWTCDEERKCCEGLVCRLWCKRIINM

SEQ ID NO: 738 - protein, 82 aa, Grammostola rosea
MKTSVVFVIAGLALLSVVCYASELKEQSSVNEVLSTIFHFEQPEERGCLEFWWKCNPNDDKCCRPKLKCSKLFKLCNFSFGK

SEQ ID NO: 739 - protein, 69 aa, Agelena orientalis
MRAIISLLLISAMVFSMIEAVPVEEGLQLFEGERGGCLPRNKFCNPSSGPRCCSGLTCKELNIWANKCL

SEQ ID NO: 740 - protein, 69 aa, Agelena orientalis
MRAIISLLLISAMVFSMIEAVPLEEGLQLFEGERGCLPRNKFCNPSSGPRCCSGLTCKELNIWDSRCLG

SEQ ID NO: 741 - protein, 68 aa, Agelena orientalis
MRAIISLLLISAMVFSMIEAVPLEEGLQLFEGERGCLPRNKFCNPSSGPRCCSGLTCKELNIWASKCL

SEQ ID NO: 742 - protein, 69 aa, Agelena orientalis
MRAIISLLLISAMVFSMIEAVPVEEGLQLFEGERGGCLPRNKFCNPSSGPRCCSGLTCKELNIWASKCL

SEQ ID NO: 743 - protein, 68 aa, Agelena orientalis
MKAIISLLLISAMVFSMIEAVPLEEGLQLFEGERGCLPHNRFCNALSGPRCCSGLTCKELNIWASKCL

SEQ ID NO: 744 - protein, 70 aa, Agelena orientalis
MKAIISLLLISAMVFSIIEPVPKKKGLQLSENERGGCLPHNKFCNALSGPRCCSGLKCKELTIWNTKCLE

SEQ ID NO: 745 - protein, 70 aa, Agelena orientalis
MRSIISLILISAMVFSMIAPVPEEERLQLSEDERGGCLPHNRFCNALTGPRCCSRLRCKELSIWDSICLG

SEQ ID NO: 746 - protein, 70 aa, Agelena orientalis
  MISC_FEATURE (23)..(23): Xaa is Ala, Arg, Asn, Asp, Asx, Cys, Glu, Gln, Glx, Gly, His, Ile, Leu, Lys, Met, Phe, Pro, Ser, Thr, Trp, Tyr, or Val.
  MISC_FEATURE (24)..(24): Xaa is Ala, Arg, Asn, Asp, Asx, Cys, Glu, Gln, Glx, Gly, His, Ile, Leu, Lys, Met, Phe, Pro, Ser, Thr, Trp, Tyr, or Val.
MRAIISLILISAMVFSMIAAVPXXEGLQLSEDERGGCLPHNRFCNALSGPRCCSGLKCKELSIWDSICLG

SEQ ID NO: 747 - protein, 69 aa, Agelena orientalis
MKAIISLLLISAMVFSMFEAVPVRRRFTAFEGERGCLPHNRFCNALSGPRCCTGLKCKELSIWDSRCLG

SEQ ID NO: 748 - protein, 70 aa, Agelena orientalis
MRAIISLLLISAMVFYIIAAVPEEEGLQLSEDERGGCLPHNRFCNALSGPRCCSGLRCKELSIRDSRCLG

SEQ ID NO: 749 - protein, 70 aa, Agelena orientalis
  MISC_FEATURE (25)..(25): Xaa is Ala, Arg, Asn, Asp, Asx, Cys, Glu, Gln, Glx, Gly, His, Ile, Leu, Lys, Met, Phe, Pro, Ser, Thr, Trp, Tyr, or Val.
MRAIISLFLISAMVFSMIQAVPEEXGLQLSEDERGGCLPHNRFCNALSGPRCCSGLKCKELSIWDSTCLG

SEQ ID NO: 750 - protein, 70 aa, Agelena orientalis
MRAIISLLLISAMVFSIIEAVPEEEGLQLSEDERGGCLPHNRFCNALSDPRCCSGLRCKELSIWDSRCLG

SEQ ID NO: 751 - protein, 70 aa, Agelena orientalis
MRAIISLLLISAMVFSMIAAVPEEEGLQLSEDERGGCLPHNRFCNALSGPRCCSGLRCKELSIWDSTCLG

SEQ ID NO: 752 - protein, 69 aa, Agelena orientalis
  MISC_FEATURE (24)..(24): Xaa is Ala, Arg, Asn, Asp, Asx, Cys, Glu, Gln, Glx, Gly, His, Ile, Leu, Lys, Met, Phe, Pro, Ser, Thr, Trp, Tyr, or Val.
  MISC_FEATURE (25)..(25): Xaa is Ala, Arg, Asn, Asp, Asx, Cys, Glu, Gln, Glx, Gly, His, Ile, Leu, Lys, Met, Phe, Pro, Ser, Thr, Trp, Tyr, or Val.
MKAIISLLLISAMVFSMIEAVPVXXGLQLFESERGCLPHNRFCNALSGPRCCSRLKCKELSIWDSRCLG

SEQ ID NO: 753 - protein, 69 aa, Agelena orientalis
MKAIISLLLISAMVFSMIEAVPLEEGLQLFEGERGCLPHNTFCNALSGPRCCSGLKCKELSIWDSRCLG

SEQ ID NO: 754 - protein, 69 aa, Agelena orientalis
MKAIISLLLISAMVFSMIEAVPVEEGLQLFEGERGCLPHNRFCNALSGPRCCSGLRCKELSIWDSRCLG

SEQ ID NO: 755 - protein, 70 aa, Agelena orientalis
MRAIISLFLISAMVFSMIQAVPEEKGLQLSEDERGGCLPHNRFCNALSGPRCCSRLKCKELSIWDSRCLG

SEQ ID NO: 756 - protein, 69 aa, Agelena orientalis
MRAIISVLLISAMVFSIIEAVPLEEGLQLFEAERVGCLPRNRFCNALSGPRCCSGLRCKELSIWASKCL

SEQ ID NO: 757 - protein, 70 aa, Agelena orientalis
MRAIIYLLLISAMVFSMTKAVPEEEGLQLSEDERGGCLPHNRFCNALSGPRCCSGLKCKELSIYDSRCLG

SEQ ID NO: 758 - protein, 69 aa, Agelena orientalis
MKAIISLLLISAMVFSMIEAVPVEEGLQLFEGERGCLPHNRFCNALSGPRCCSGLKCKELSIWDSRCLG

SEQ ID NO: 759 - protein, 70 aa, Agelena orientalis
MRAIISLILISAMVFSMIAAVPEEEGLQLSEDERGGCLPHNRFCNALSGPRCCSGLRCKELSIWDSRCLG

SEQ ID NO: 760 - protein, 33 aa, Phoneutria nigriventer
VFCRFNGQQCTSDGQCCYGKCRTAFLRMICMGG

SEQ ID NO: 761 - protein, 43 aa, Agelenopsis aperta
  MISC_FEATURE (20)..(20): Xaa is Ala, Arg, Asn, Asp, Asx, Cys, Glu, Gln, Glx, Gly, His, Ile, Leu, Lys, Met, Phe, Pro, Ser, Thr, Trp, Tyr, or Val.
  MISC_FEATURE (40)..(40): Xaa is Ala, Arg, Asn, Asp, Asx, Cys, Glu, Gln, Glx, Gly, His, Ile, Leu, Lys, Met, Phe, Pro, Ser, Thr, Trp, Tyr, or Val.
NCIDFGGDCDGEKDDCQCCXRNGYCSCYNLFGYLKRGCKXEVG

SEQ ID NO: 762 - protein, 39 aa, Missulena bradleyi
SPVCTPSGQPCQPNTQPCCNNAEEEQTINCNGNTVYRCA

SEQ ID NO: 763 - protein, 36 aa, Hadronyche infensa; identical to SEQ ID NO: 615

SEQ ID NO: 764 - protein, 37 aa, Hadronyche versuta; identical to SEQ ID NO: 24

SEQ ID NO: 765 - protein, 37 aa, Hadronyche formidabilis; identical to SEQ ID NO: 631

SEQ ID NO: 766 - protein, 37 aa, Hadronyche infensa; identical to SEQ ID NO: 609

SEQ ID NO: 767 - protein, 37 aa, Hadronyche versuta
SSTCIPSGQPCPYNENCCSQSCTYKENENGNTVKRCD

SEQ ID NO: 768 - protein, 37 aa, Hadronyche infensa; identical to SEQ ID NO: 613

SEQ ID NO: 769 - protein, 37 aa, Hadronyche versuta
SSTCIPSGQPCPYNENCCSQSCTFKENENGNTVKRCD

SEQ ID NO: 770 - protein, 37 aa, Hadronyche versuta; identical to SEQ ID NO: 601

SEQ ID NO: 771 - protein, 37 aa, Hadronyche versuta
SPTCIPSGQPCPYNENCCSQSCTYKENENGNTVKRCD

SEQ ID NO: 772 - protein, 37 aa, Hadronyche versuta
SAVCIPSGQPCPYSKYCCSGSCTYKTNENGNSVQRCD

SEQ ID NO: 773 - protein, 45 aa, Hadronyche versuta; identical to SEQ ID NO: 589

SEQ ID NO: 774 - protein, 32 aa, Phoneutria nigriventer
VFCRSNGQQCTSDGQCCYGKCMTAFMGKICMR

SEQ ID NO: 775 - protein, 32 aa, Phoneutria reidyi
AFCRFNGQQCTSDGQCCNGRCINAFQGRICIG

SEQ ID NO: 776 - protein, 33 aa, Ceratogyrus marshalli
DCLGWFKSCDPKNDKCCKNYTCSRRDRWCKYDL

SEQ ID NO: 777 - protein, 39 aa, Aphonopelma sp
IFECVFSCDIEKEGKPCKPKGEKKCTGGWKCKIKLCLKI

SEQ ID NO: 778 - protein, 29 aa, Grammostola rosea
YCQKWMWTCDSKRKCCEDMVCQLWCKKRL

SEQ ID NO: 779 - protein, 35 aa, Heteroscodra maculata
ECRYLFGGCSSTSDCCKHLSCRSDWKYCAWDGTFS

SEQ ID NO: 780 - protein, 35 aa, Psalmopoeus cambridgei
SECRWFMGGCDSTLDCCKHLSCKMGLYYCAWDGTF

SEQ ID NO: 781 - protein, 34 aa, Stromatopelma calceatum griseipes
TCRYLFGGCKTTADCCKHLACRSDGKYCAWDGTF

SEQ ID NO: 782 - protein, 34 aa, Stromatopelma calceatum
DCTRMFGACRRDSDCCPHLGCKPTSKYCAWDGTI

SEQ ID NO: 783 - protein, 35 aa, Theraphosa blondi
AACLGMFESCDPNNDKCCPNRECNRKHKWCKYKLW

SEQ ID NO: 784 - protein, 32 aa, Phoneutria keyserlingi
AFCKYNGEQCTSDGQCCNGRCRTAFMGKICMG

SEQ ID NO: 785 - protein, 35 aa, Phoneutria nigriventer
MPCPKILKQCKSDEDCCRGWKCFGFSIKDKMCISR

SEQ ID NO: 786 - protein, 40 aa, Phoneutria reidyi
ECADVYKEVWYPEKPCCKDRACQCSLGMNCKCKATLGDIF

SEQ ID NO: 787 - protein, 31 aa, Phoneutria nigriventer
VFCRFNGQQCTSDGQCCYGKCRTAFMGKICM

SEQ ID NO: 788 - protein, 36 aa, Phoneutria nigriventer
IACAPRFSLCNSDKECCKGLRCKSRIANMWPTFCSQ

SEQ ID NO: 789 - protein, 36 aa, Phoneutria reidyi
IACAPRGLLCFRDKECCKGLTCKGRFVNTWPTFCLV

SEQ ID NO: 790 - protein, 32 aa, Phoneutria nigriventer
SFCIPFKPCKSDENCCKKFKCKTTGIVKLCRW

SEQ ID NO: 791 - protein, 33 aa, Ceratogyrus marshalli
DCLGWFKSCDPKNDKCCKNYTCSRRDRWCKYYL

SEQ ID NO: 792 - protein, 39 aa, Aphonopelma sp
IFECVFSCDIEKEGKPCKPKGEKKCSGGWKCKIKLCLKI

SEQ ID NO: 793 - protein, 38 aa, Heteroscodra maculata
ECRYFWGECNDEMVCCEHLVCKEKWPITYKICVWDRTF

SEQ ID NO: 794 - protein, 35 aa, Psalmopoeus cambridgei
GACRWFLGGCKSTSDCCEHLSCKMGLDYCAWDGTF

SEQ ID NO: 795 - protein, 35 aa, Theraphosa blondi
DDCLGMFSSCDPKNDKCCPNRVCRSRDQWCKYKLW

SEQ ID NO: 796 - protein, 36 aa, Phoneutria keyserlingi
IACAPRGQLCFSDKLCCIGLRCKSRVANMWPTFCLV

SEQ ID NO: 797 - protein, 34 aa, Phoneutria nigriventer
  MISC_FEATURE (31)..(31): Xaa is Ala, Arg, Asn, Asp, Asx, Cys, Glu, Gln, Glx, Gly, His, Ile, Leu, Lys, Met, Phe, Pro, Ser, Thr, Trp, Tyr, or Val.
GCANAYKSCNGPHTCCWGYNGYKKACICSGXNWK

SEQ ID NO: 798 - protein, 39 aa, Ceratogyrus marshalli
GVDKEGCRKLLGGCTIDDDCCPHLGCNKKYWHCGWDGTF

SEQ ID NO: 799 - protein, 34 aa, Paraphysa scrofa
DCLGFLWKCNPSNDKCCRPNLVCSRKDKWCKYQI

SEQ ID NO: 800 - protein, 34 aa, Psalmopoeus cambridgei
ECRWYLGGCKEDSECCEHLQCHSYWEWCLWDGSF

SEQ ID NO: 801 - protein, 35 aa, Theraphosa blondi
DDCLGMFSSCDPNNDKCCPNRVCRVRDQWCKYKLW

SEQ ID NO: 802 - protein, 41 aa, Hysterocrates gigas
GVDKAGCRYMFGGCSVNDDCCPRLGCHSLFSYCAWDLTFSD

SEQ ID NO: 803 - protein, 37 aa, Heteropoda venatoria
DDDCGWIMDDCTSDSDCCPNWVCSKTGFVKNICKYEM

SEQ ID NO: 804 - protein, 36 aa, Heteropoda venatoria
ADCGWLFHSCESNADCCENWACATTGRFRYLCKYQI

SEQ ID NO: 805 - protein, 35 aa, Agelena orientalis
GGCLPHNRFCNALSGPRCCSGLKCKELSIWDSRCL

SEQ ID NO: 806 - protein, 70 aa, Agelena orientalis
MRAIISLFLISAMVFSMIQAVPEEEGLQLSEDERGGCLPHNRFCNALSGPRCCSGLKCKELSIWDSRCLG

SEQ ID NO: 807 - protein, 88 aa, Latrodectus tredecimguttatus
MSKLFFVVFLCLIISVFAISPADIGCTDISQADFDEKNNNCIKCGEDGFGEEMVNRCRDKCFTDNFYQSCVDLLNKVYEEKDTPPVQE

SEQ ID NO: 808 - protein, 33 aa, Phoneutria nigriventer
GFCAQKGIKCHDIHCCTNLKCVREGSNRVCRKA

SEQ ID NO: 809 - protein, 86 aa, Psalmopoeus cambridgei
MMRVLIVTAVFTFFLVLTSSGHDEDNEQRNILEGMFLDRAIETPKGLEEKRACGILHDNCVYVPAQNPCCRGLQCRYGKCLVQVGR

SEQ ID NO: 810 - protein, 65 aa, Psalmopoeus cambridgei
MGFKLVLFIAVLTLVGSSNAEISAKMDSRDSPMIQERRCLPAGKTCVRGPMRVPCCGSCSQNKCT

SEQ ID NO: 811 - protein, 36 aa, Plesiophrictus guangxiensis
DGECGGFWWKCGSGKPACCPKYVCSPKWGLCNFPMP

SEQ ID NO: 812 - protein, 36 aa, Plesiophrictus guangxiensis
EGECGGFWWKCGSGKPACCPKYVCSPKWGLCNFPMP

SEQ ID NO: 813 - protein, 33 aa, Plesiophrictus guangxiensis
ECRKMFGGCSVDSDCCAHLGCKPTLKYCAWDGT

SEQ ID NO: 814 - protein, 68 aa, Haplopelma huwenum
MNMKILVLVAVLCLVVSTHAERHSKTDMEDMEDSPMIQERKCLPPGKPCYGATQKIPCCGVCSHNKCT

SEQ ID NO: 815 - protein, 55 aa, Haplopelma huwenum
IDTCRLPSDRGRCKASFERWYFNGRTCAKFIYGGCGGNGNKFPTQEACMKRCAKA

SEQ ID NO: 816 - protein, 81 aa, Haplopelma huwenum
MRASMFLALAGLVLLFVVCYASESEEKEFPRELLFKFFAVDDFKGEERACKGVFDACTPGKNECCPNRVCSDKHKWCKWKL

SEQ ID NO: 817 - protein, 85 aa, Haplopelma huwenum
MKVTLIAILTCAAVLVLHTTAAEELEAESQLMEVGMPDTELAAVDEERLFECSFSCEIEKEGDKPCKKKKCKGGWKCKFNMCVKV

SEQ ID NO: 818 - protein, 37 aa, Haplopelma huwenum
LFECSFSCEQEKEGDKPCKKKKCKGGWKCKFNMCVKV

SEQ ID NO: 819 - protein, 87 aa, Haplopelma huwenum
MVNMKASMFLTFAGLVLLFVVCYASESEEKEFPKEMLSSIFAVDNDFKQEERDCAGYMRECKEKLCCSGYVCSSRWKWCVLPAPWRR

SEQ ID NO: 820 - protein, 89 aa, Haplopelma huwenum
MVNMKASMFLALAGLVLLFVVCYASESEEKEFSNELLSSVLAVDDNSKGEERECLEIFKACNPSNDQCCKSSKLVCSRKTRWCKYQIGK

SEQ ID NO: 821 - protein, 86 aa, Haplopelma huwenum
MKSIVFVALFGLALLAVVCSASEDAHKELLKEVVRAMVVDKTDAVQAEERECRWYLGGCSQDGDCCKHLQCHSNYEWCVWDGTFSK

SEQ ID NO: 822 - protein, 41 aa, Haplopelma huwenum
NCIGEQVPCDENDPRCCSGLVVLKKTLHGIWIKSSYCYKCK

SEQ ID NO: 823 - protein, 83 aa, Haplopelma huwenum
MKVTLIAILTCAAVLVLHTTAAEELEESQLMEVGMPDTELAAVDEERLFECSISCEIEKKGESCKPKKCKGGWKCKFNMCVKV

SEQ ID NO: 824 - protein, 34 aa, Haplopelma huwenum
IICAPEGGPCVAGIGCCAGLRCSGAKLGLAGSCQ

SEQ ID NO: 825 - protein, 33 aa, Haplopelma hainanum
ECKGFGKSCVPGKNECCSGYACNSRDKWCKVLL

SEQ ID NO: 826 - protein, 33 aa, Haplopelma hainanum
GCKGFGDSCTPGKNECCPNYACSSKHKWCKVYL

SEQ ID NO: 827 - protein, 35 aa, Haplopelma hainanum
ECLGFGKGCNPSNDQCCKSSNLVCSRKHRWCKYEI

SEQ ID NO: 828 - protein, 35 aa, Haplopelma hainanum
ECLGFGKGCNPSNDQCCKSANLVCSRKHRWCKYEI

SEQ ID NO: 829 - protein, 35 aa, Grammostola rosea
ECRYLFGGCKTTSDCCKHLGCKFRDKYCAWDFTFS

SEQ ID NO: 830 - protein, 35 aa, Grammostola rosea
ECRYLFGGCKTTADCCKHLGCKFRDKYCAWDFTFS

SEQ ID NO: 831 - protein, 33 aa, Heteropoda venatoria
DCGTIWHYCGTDQSECCEGWKCSRQLCKYVIDW

SEQ ID NO: 832 - protein, 30 aa, Heteropoda venatoria
DDCGKLFSGCDTNADCCEGYVCRLWCKLDW

SEQ ID NO: 833 - protein, 31 aa, Heteropoda venatoria
ECGTLFSGCSTHADCCEGFICKLWCRYERTW

SEQ ID NO: 834 - protein, 29 aa, Heteropoda venatoria
DDCGTLFSGCDTSKDCCEGYVCHLWCKYK

SEQ ID NO: 835 - protein, 83 aa, Haplopelma huwenum
MKTSMFLTLTGLGLLFVVCYASESEEKEFPKELLSSIFAADSDFKVEERGCLGDKCDYNNGCCSGYVCSRTWKWCVLAGPWRR

SEQ ID NO: 836 - protein, 77 aa, Macrothele gigas
MKVFSFTVVVVMILSLSAFVLAGDEGDVMKKIVAMEEAVEERACLAEYQKCEGSTVPCCPGLSCSAGRFRKTKLCTK

SEQ ID NO: 837 - protein, 81 aa, Macrothele gigas
MKAPATIVILIMSLISVLWATADTEDGNLLFPIEDFIRKFDEYPVQPKERSCKLTFWRCKKDKECCGWNICTGLCIPPGKK

SEQ ID NO: 838 - protein, 38 aa, Macrothele gigas
CMGYDIHCTDRLPCCFGLECVKTSGYWWYKKTYCRRKS

SEQ ID NO: 839 - protein, 121 aa, Macrothele gigas
MMTLSPFLLLLIAAVVIGNASEGEVKNEFEERLKDEFKDPSRSEVAEVILLRELEVLEETLFGKEMTSDTEENRNSREKRCMGYDIECNENLPCCKHRKLECVETSGYWWYKRKYCRPIKG

SEQ ID NO: 840 - protein, 79 aa, Macrothele gigas
MKAPATTLILVMSLISVLWATPDLEEGDLLAELGDLIATDDEYPMKPEERGCKLTFWKCKNKKECCGWNACALGICMPR

SEQ ID NO: 841 - protein, 77 aa, Macrothele gigas
MKVFSFTIGLVVIISLFAFALAYDEETDLMKKLVEMERAIEQRIICAPEGGPCVVGIGCCKGYSCAPGLLGLVGHCQ

SEQ ID NO: 842 - protein, 81 aa, Macrothele gigas
MKYVMVILGLLVLAAICCASEVEELDWRQEIARAILEAELQPEERDCKGLFRQCKKSSECCKGSSCESDLTGLCIFNLPGR

SEQ ID NO: 843 - protein, 80 aa, Macrothele gigas
MKFATFAFTLCVVISLSVLVLADEEEKDFLMNLIQPLKESEERQFCGTNGKPCVNGQCCGALRCVVTYHYADGVCLKMNP

SEQ ID NO: 844 - protein, 39 aa, Brachypelma albiceps
ILECVFSCDIKKEGKPCKPKGEKKCTGGWRCKIKLCLKI

SEQ ID NO: 845 - protein, 39 aa, Brachypelma smithi; identical to SEQ ID NO: 792

SEQ ID NO: 846 - protein, 29 aa, Paraphysa scrofa
YCQKWMWTCDSARKCCEGLVCRLWCKKII

SEQ ID NO: 847 - protein, 40 aa, Psalmopoeus cambridgei
EDCIPKWKGCVNRHGDCCEGLECWKRRRSFEVCVPKTPKT

SEQ ID NO: 848 - protein, 39 aa, Brachypelma albiceps
IFECVFSCDIKKEGKPCKPKGEKKCTGGWRCKIKLCLKI

SEQ ID NO: 849 - protein, 31 aa, Paraphysa scrofa; identical to SEQ ID NO: 737

SEQ ID NO: 850 - protein, 34 aa, Brachypelma smithi
SCVDFQTKCKKDSDCCGKLECSSRWKWCVYPSPF

SEQ ID NO: 851 - protein, 32 aa, Apomastus schleringi
WLGCARVKEACGPWEWPCCSGLKCDGSECHPQ

SEQ ID NO: 852 - protein, 35 aa, Thrixopelma pruriens
ECRYWLGGCSAGQTCCKHLVCSRRHGWCVWDGTFS

SEQ ID NO: 853 - protein, 30 aa, Thrixopelma pruriens
YCQKWMWTCDSERKCCEGMVCRLWCKKKLW

SEQ ID NO: 854 - protein, 99 aa, Macrothele gigas
TSQGTTPDKVQLEVNCISNLPNNEVEETDLLRELEMIEENLFGKELSFVPEENRNSRHKRCMGYDIECNERLHCCADLECVKTSGRWWYKKTYCRRKSG

SEQ ID NO: 855 - protein, 29 aa, Macrothele raveni
GCKLTFWKCKNKKECCGWNACALGICMPR

SEQ ID NO: 856 - protein, 30 aa, Heteropoda venatoria
DDCGGLFSGCDSNADCCEGYVCRLWCKYKL

SEQ ID NO: 857 - protein, 31 aa, Coremiocnemis valida
ACSRAGENCYKSGRCCDGLYCKAYVVTCYKP

SEQ ID NO: 858 - protein, 34 aa, Grammostola rosea
ECGKFMWKCKNSNDCCKDLVCSSRWKWCVLASPF

SEQ ID NO: 859 - protein, 32 aa, Grammostola rosea
YCQKWMWTCDEERKCCEGLVCRLWCKKKIEEG

SEQ ID NO: 860 - protein, 34 aa, Grammostola rosea
DCLGWFKGCDPDNDKCCEGYKCNRRDKWCKYKLW

SEQ ID NO: 861 - protein, 36 aa, Grammostola rosea
DCVRFWGKCSQTSDCCPHLACKSKWPRNICVWDGSV

SEQ ID NO: 862 - protein, 85 aa, Haplopelma huwenum
MKVTLIAILTCAAVLVLHTTAAEELEAESQLMEVGMPDTELAAVDEERPFECSFSCEIEKEGDKPCKKKKCKGGWKCKFNMCVKV

SEQ ID NO: 863 - protein, 88 aa, Haplopelma huwenum
MGIARILSAVLFLSVLFVVTFPALLSADHHDGRIDTCRLPSDRGRCKASFERWYFNGRTCAKFIYGGCGGNGNKFPTQEACMKRCGKA

SEQ ID NO: 864 - protein, 99 aa, Lasiodora sp
MNTIQVIIFAVVLVLTVTVGQADEDSPEASLLRKLKEAEASLFGQNLEESRNSRQKRCGGVDAPCDKDRPDCCSYAECLRPSGYGWWHGTYYCYRKRER

SEQ ID NO: 865 - protein, 81 aa, Haplopelma huwenum
MKASMFLALAGLVLLFVVCYASESEEKEFPRELLSKIFAVDDFKGEERACKGVFDACTPGKNECCSNRVCSDKHKWCKWKL

SEQ ID NO: 866 - protein, 102 aa, Hadronyche infensa
MKFSKLSLTLALILTQAIFVLCGKINEDFMENGLESHALHDEIRKPIDTEKADAERGVVDCVLNTLGCSSDKDCCGMTPSCTLGICAPSVGGLVGGLLGRAL

SEQ ID NO: 867 - protein, 102 aa, Hadronyche infensa
MKFSKLSLTLALILTQALLVVCGKINEDFMENGLESHALHDEIRKPIDTEKADAERGVLDCVVNTLGCSSDKDCCGMTPSCTLGICAPSVGGIVGGLLGRAL

SEQ ID NO: 868 - protein, 99 aa, Brachypelma smithi
MNTIQVIIFAVVLVLTVTVGQADEDSAETSLLRKLEEAEAAMFGQYLEESKNSREKRCIGESVPCDKDDPRCCREYECLKPTGYGWWYASYYCYRKKSG

SEQ ID NO: 869 - protein, 81 aa, Haplopelma huwenum
MKASMFLAFAGLVLLFVVCYASESEEKEFPRELISKIFAVDDFKGEERACKGVFGACTPGKNECCPNRVCSDKHKWCKWKL

SEQ ID NO: 870 - protein, 84 aa, Haplopelma huwenum
MKVTLIAILTCAAVLVLHTTAAEELEAESQLMEVGMPDTELAAVDEERLFECSISCEIEKKGESCKPKECKGGWKCKFNMCVKV

SEQ ID NO: 871 - protein, 83 aa, Haplopelma huwenum
MKTSMFLTLTGLVLLFVVCYASESEEKEFPKELLSSIFAADSDFKEEERGCFGYKCDYYKGCCSGYVCSPTWKWCVRPGPGRR

SEQ ID NO: 872 - protein, 85 aa, Haplopelma huwenum
MKVTLIAILTCAAVLVLHTTAAEELEAESQLMEVGMPDTELAAVDEERLFECSFSCEIEKEGDKLCKKKKCKGGWKCKFNMCVKV

SEQ ID NO: 873 - protein, 88 aa, Latrodectus tredecimguttatus
MLKLICIAFLVTVLTLVAGQDSLDPAEFGCADDVNQAELLKNNDICLQCEDLHKEGVVFSLCKTNCFTTEYFQHCVKDLEEAKKEPPE

SEQ ID NO: 874 - protein, 37 aa, Atrax robustus; identical to SEQ ID NO: 627

SEQ ID NO: 875 - protein, 76 aa, Atrax robustus; identical to SEQ ID NO: 582

SEQ ID NO: 876 - protein, 78 aa, Atrax robustus; identical to SEQ ID NO: 594

SEQ ID NO: 877 - protein, 39 aa, Brachypelma smithi
IIECVFSCDIEKEGKPCKPKGEKKCSGGWKCKIKLCLKI

SEQ ID NO: 878 - protein, 83 aa, Hadronyche venenata
MNTATGVIALLVLATVIGCIEAETRADLQGAFESYEGEAAEKIFRRSPTCIPSGQPCPYNENCCSKSCTYKEMKTATPVQRCD

SEQ ID NO: 879 - protein, 84 aa, Hadronyche venenata
MNTATGVIALVVLATVIGCIEAEETRADLQGAFESYEGEAADKIFRRSPTCIPSGQPCPYNENCCSKSCTYKENENGNTVQRCD

SEQ ID NO: 880 - protein, 84 aa, Hadronyche venenata
MNTATGVIALLVLATVIGCIEAEETRADLQGAFESYEGEGADKIFRRSPTCIPSGQPCPYNENCCSKSCTYKENENGNTVQRCD

SEQ ID NO: 881 - protein, 84 aa, Hadronyche venenata
MNTATGVIALLVLATVIGCIEVEETRADLQGAFESYEGEAAEKIFRRSPTCIPSGQPCPYNENCCSKSCTYKENENGNTVQRCD

SEQ ID NO: 882 - protein, 84 aa, Hadronyche venenata
MNTATGVIALLVLATVIGCIEAEETRADLQGAFESYEGEAADKIFRRSPTCIPSGQPCPYNENCCSKSCTYKENENGNTVQRCD

SEQ ID NO: 883 - protein, 84 aa, Hadronyche venenata
MNTATGVIALLVLATVIGCIEAEDTRADLQGGLESYEGEAADKIFRRSPTCIPSGQPCPYNENCCSKSCTYKENENGNTVQRCD

SEQ ID NO: 884 - protein, 76 aa, Hadronyche versuta; identical to SEQ ID NO: 582

SEQ ID NO: 885 - protein, 76 aa, Hadronyche versuta; identical to SEQ ID NO: 580

SEQ ID NO: 886 - protein, 76 aa, Hadronyche versuta; identical to SEQ ID NO: 584

SEQ ID NO: 887 - protein, 65 aa, Haplopelma huwenum
MNMKILVLVAVLCLVVSTHAERHSKTDMEDSPMIQERKCLPPGKPCYGATQKIPCCGVCSHNKCT

SEQ ID NO: 888 - protein, 32 aa, Haplopelma huwenum
DCAGYMRECKEKLCCSGYVCSSRWKWCVLPAP

SEQ ID NO: 889 - protein, 33 aa, Haplopelma huwenum
ECRWYLGGCSQDGDCCKHLQCHSNYEWCVWDGT

SEQ ID NO: 890 - protein, 83 aa, Haplopelma huwenum
MKTSMFLTLTGLVLLFVVCYASESEEKDFPKELLSSIFAADSDFKVEERGCLGDKCDYNNGCCSGYVCSRTWKWCVLAGPWRR

SEQ ID NO: 891 - protein, 81 aa, Haplopelma huwenum
MKASMFLTFAGLVLLFVVCYASESEEKEFPRELISKIFAVDDFKGEERACKGVFDACTPGKNECCPNRVCSDKHKWCKWKL

SEQ ID NO: 892 - protein, 81 aa, Haplopelma huwenum
MKASMFLAFAGLALLFVVCYASESEEKEFPRELISKIFAVDDFKGEERACKGVFDACTPGKNECCPNRVCSDKHKWCKWKL

SEQ ID NO: 893 - protein, 81 aa, Haplopelma huwenum
MKASMFLAFAGLVLLFVVCYASESEEKEFPRELISKIFAVDDFKGEERACKGVFDACTPGKNECCPNRVCSDKHKWCKWKL

SEQ ID NO: 894 - protein, 81 aa, Haplopelma huwenum
MEASMFLAFAGLVLLFVVCYASESEEKEFPRELISKIFAVDDFKGEERACKGVFDACTPGKNECCPNRVCSDKHKWCKWKL

SEQ ID NO: 895 - protein, 81 aa, Haplopelma huwenum
MKASMFLAFAGLVLLFVVCYASESEEKELPRELLSKIFAVDDFKGEERACKGVFDACTPGKNECCPNRVCSDKHKWCKWKL

SEQ ID NO: 896 - protein, 81 aa, Haplopelma huwenum
MKASMFLALAGLVLLFVVCYASESEEKEFPRELLSKIFAVDDFKGEERACKGVFDACTPGKNECCPNRVCSDKHKWCKWKL

SEQ ID NO: 897 - protein, 83 aa, Haplopelma huwenum; identical to SEQ ID NO: 890

SEQ ID NO: 898 - protein, 83 aa, Haplopelma huwenum
MKTSMFLTLTGLVLLFVDCYASESEEKEFPKELLSSIFAADSDFKVEERGCLGDKCDYNNGCCSGYVCSRTWKWCVLAGPWRR

SEQ ID NO: 899 - protein, 83 aa, Haplopelma huwenum
MKTSMFLTLTGLVLLFVVCYASESEEKEFPKELPSSIFAADSDFKVEERGCLGDKCDYNNGCCSGYVCSRTWKWCVLAGPWRR

SEQ ID NO: 900 - protein, 83 aa, Haplopelma huwenum
MKTSMFLTLTGLVLLFVVCYASESEEKEFPKELLSSIFAADSDFKVEERGCLGDKCDYNNGCCSGYVCSRTWKWCVLAGPWRR

SEQ ID NO: 901 - protein, 83 aa, Haplopelma huwenum
MQTSMFLTLTGLVLLFVVCYASESEEKEFPKELLSSIFAADSDFKEEERGCFGYKCDYYKGCCSGYVCSPTWKWCVRPGPGRR

SEQ ID NO: 902 - protein, 83 aa, Haplopelma huwenum
MKTSMFLTLTGLVLLFVVCYASESEEKEFPKELLSSIFAADSDFKVEERGCLGDKCDYNNGCCSGYVCSRTWKWCVLAGPWCR

SEQ ID NO: 903 - protein, 83 aa, Haplopelma huwenum
MKTSMFLTLTGLVLLFVVCYASESEEKEFPKELLSSIFAADSDFKVEERGCLGDKCDYNNGCCSGYVCPRTWKWCVLAGPWRR

SEQ ID NO: 904 - protein, 84 aa, Haplopelma huwenum
MKVTLIAILTCAAVLVLHTTAAEELEESQLMEVGMPDTELAAVDEERLFECSFSCEIEKEGDKPCKKKKCKGGWKCKFNMCVKV

SEQ ID NO: 905 - protein, 85 aa, Haplopelma huwenum
MKVTLIAILTCAAVLVLHTTAAEELEAESQLMEVGMPDTESAAVDEERLFECSFSCEIEKEGDKPCKKKKCKGGWKCKFNMCVKV

SEQ ID NO: 906 - protein, 84 aa, Haplopelma huwenum
MKVTLIAILTCAAVLVLHTTAAEELEESQLMEVGMPDTELAAVDEERPFECSFSCEIEKEGDKPCKKKKCKGGWKCKFNMCVKV

SEQ ID NO: 907 - protein, 84 aa, Haplopelma huwenum
MKVTLIAFLTCAAVLVLHTTAAEELEAESQLMEVGMPDTELAAVDEERLFECSISCEIEKKGESCKPKKCKGGWKCKFNMCVKV

SEQ ID NO: 908 - protein, 84 aa, Haplopelma huwenum
MKVTLIAILTCAAVLVLHTTAAEELEAESQLMEVGMPDTELAAVDEERLFECSISCEIEKKGESCKPKKCKGGWKCKFNMCVKV

SEQ ID NO: 909 - protein, 83 aa, Haplopelma huwenum; identical to SEQ ID NO: 823

SEQ ID NO: 910 - protein, 88 aa, Haplopelma huwenum
MGIARILSAVLFLSVLFVVTFPALLSADHRDGRIDTCRLPSDRGRCKASFERWYFNGRTCAKFIYGGCGGNGNKFPTQEACMKRCAKA

SEQ ID NO: 911 - protein, 85 aa, Haplopelma huwenum
MKVTLIAILTCAAVLVLHTTAAEELEAESQLMEVGMPDTELAAVDEERLFECSFSCEIEKEGDKPCKKKKCKGGWKCKFNMCVKF

SEQ ID NO: 912 - protein, 88 aa, Haplopelma huwenum
MGIARILSAVLFLSVLFVVTFPALLSADHHDGRIDTCRLPSDRGRCKASFERWYFNGRTCAKFIYGGCGGNGNKFPTQEACMKRCAKA

SEQ ID NO: 913 - protein, 78 aa, Hadronyche infensa; identical to SEQ ID NO: 614

SEQ ID NO: 914 - protein, 78 aa, Hadronyche infensa; identical to SEQ ID NO: 620

SEQ ID NO: 915 - protein, 79 aa, Hadronyche infensa; identical to SEQ ID NO: 608

SEQ ID NO: 916 - protein, 79 aa, Hadronyche infensa; identical to SEQ ID NO: 610

SEQ ID NO: 917 - protein, 79 aa, Hadronyche infensa
MNTATGFIVLLVLATVIGCISTDFQGGFEPYEEEDAERIFRRSPTCIPTGQPCPYNENCCSQSCTYKANENGNQVKRCD

SEQ ID NO: 918 - protein, 79 aa, Hadronyche infensa
MNTATGFIVLLVLATVIGCISADFQGGFEPYEEEDAQRIFRRSPTCIPTGQPCPYNENCCSQSCTYKANENGNQVKRCD

SEQ ID NO: 919 - protein, 78 aa, Hadronyche infensa; identical to SEQ ID NO: 612

SEQ ID NO: 920 - protein, 79 aa, Hadronyche infensa; identical to SEQ ID NO: 606

SEQ ID NO: 921 - protein, 79 aa, Hadronyche infensa; identical to SEQ ID NO: 604

SEQ ID NO: 922 - protein, 79 aa, Hadronyche infensa
MNTATGFIVLLVLATVIGCISADFQGGFEPYEEEDAERIFRRSPTCIPTGQPCPYNENCCSQSCTYKTNENGNQVKGCD

SEQ ID NO: 923 - protein, 78 aa, Hadronyche infensa; identical to SEQ ID NO: 616

SEQ ID NO: 924 - protein, 78 aa, Hadronyche infensa; identical to SEQ ID NO: 622

SEQ ID NO: 925 - protein, 78 aa, Hadronyche infensa; identical to SEQ ID NO: 618

SEQ ID NO: 926 - protein, 37 aa, Heriaeus melloteei
GCIPYGKTCEFWSGPWCCAGKCKLNVWSMTLSCTRNF

SEQ ID NO: 927 - protein, 40 aa, Heriaeus melloteei
GCIPSFGECAWFSGESCCTGICKWVFFTSKFMCRRVWGKD

SEQ ID NO: 928 - protein, 35 aa, Agelena orientalis
KGCLPRNRFCNALSGPRCCSGLRCKELSIWASKCL

SEQ ID NO: 929 - protein, 35 aa, Agelena orientalis
GGCLPHNRFCNALSGPRCCSGLTCKELNIWASKCL

SEQ ID NO: 930 - protein, 29 aa, Eucratoscelus constrictus
YCQKFLWTCDTERKCCEDMVCELWCKLEK

SEQ ID NO: 931 - protein, 86 aa, Haplopelma huwenum
MKASMFLALAGLVLLFVVCYASESEEKEFSNELLSSVLAVDDNSKGEERECLEIFKACNPSNDQCCKSSKLVCSRKTRWCKYQIGK

SEQ ID NO: 932 - protein, 86 aa, Haplopelma huwenum
MKASMFLALAGLVQLFVVCYASESEEKEFSNELLSSVLAVDDNSKGEERECLEIFKACNPSNDQCCKSSKLVCSRKTRWCKYQIGK

SEQ ID NO: 933 - protein, 81 aa, Haplopelma huwenum
MKASMFLAFAGLVLLFVVCYASESEEKEFPRELISKIFAVDDFKGEERACKGVFDACTPGKNECCPNRVCSDEHKWCKWKL

SEQ ID NO: 934 - protein, 86 aa, Chilobrachys jingzhao
MKVSLLITLAVLGVMFVWASAAELQERGSDQKDSPAWLKSMERIFQSEERECKKMFGGCTVHSDCCAHLGCKPTLKYCAWDGTFGK

SEQ ID NO: 935 - protein, 83 aa, Chilobrachys jingzhao
MKGSAFAIILGLVVLCACSFAEDEQDQFASPNELLRSMFLESRHELIPEVEGRYCQKWMWTCDSERKCCEGYVCELWCKYNMG

SEQ ID NO: 936 - protein, 63 aa, Chilobrachys jingzhao
MKNTSILFILGLALLLVLAFEVQVGESDGECGGFWWKCGSGKPACCPKYVCSPKWGLCNFPMP

SEQ ID NO: 937 - protein, 86 aa, Chilobrachys jingzhao
MKVSVLITLAVLGVMFVWASAAELEERGSDHRDSPAWLKSMERIFQSEERECRKMFGGCSVHSDCCAHLGCKPTLKYCAWDGTFGK

SEQ ID NO: 938 - protein, 77 aa, Chilobrachys jingzhao
MKTSVLLVILGIAAITVQCTASESVEQDSLRTFVDTVLGWNAEMASEARCGGWMAKCADSDDCCETFHCTRFNVCGK

SEQ ID NO: 939 - protein, 77 aa, Chilobrachys jingzhao
MKTSVLLVILGIAAITVQCTASESVEQDSLRTFVDAVLGWNAEMASEARCGGWMAKCADSDDCCETFHCTRFNVCGK

SEQ ID NO: 940 - protein, 77 aa, Chilobrachys jingzhao
MKTSVLLVILGIAAITVQCTASESVEQDSLRTFVDAVLGWNAEMASEARCGGWMAKCADSDDCCEAFHCTRFNVCGK

SEQ ID NO: 941 - protein, 77 aa, Chilobrachys jingzhao
MNTSDPPAVLRIAAITLLCTASESVEQNPLIPFENAVLGSYAKMASEKRCDGWMAKCPDRDDCCETFHCTRFNARGN

SEQ ID NO: 942 - protein, 87 aa, Chilobrachys jingzhao
MKVLVLITLAVLGAMFVWTSAAELEERGSDQRDSPAWVKSMERIFQSEERACREWLGGCSKDADCCAHLECRKKWPYHCVWDWTVRK

SEQ ID NO: 943 - protein, 78 aa, Chilobrachys jingzhao
MKTSVLVTVLGLAVISVLCSASQDEEQDMYDELLSAVFEVNDELQSEARCGEKNDRCKTNQDCCSGFRCTKFRRCGRR

SEQ ID NO: 944 - protein, 85 aa, Chilobrachys jingzhao
MKVSVLITLAVLGVMFVWASAAELEERGSDQRDSPAWLKSMERIFQSEERECRKMFGGCSVDSDCCAHLGCKPTLKYCAWDLTFP

SEQ ID NO: 945 - protein, 86 aa, Chilobrachys jingzhao
MKVSVLITLAVLGVMFVWTSAAELEERGSDQRDSPAWLKSMERIFQSEERECRKMFGGCSVDSDCCAHLGCKPTLKYCAWDGTFGK

SEQ ID NO: 946 - protein, 86 aa, Chilobrachys jingzhao
MKASVLITLAVLGVMFVWASAAELEERGSDQRDSPAWLKSMERIFQSEERECRKMFGGCSVDSDCCAHLGCKPTLKYCAWDGTFGK

SEQ ID NO: 947 - protein, 86 aa, Chilobrachys jingzhao
MKVSVVITLAVLGVMFVWASAAELEERGSDQRDSPAWLKSMERIFQSEERECRKMFGGCSVDSDCCAHLGCKPTLKYCAWDGTFGK

SEQ ID NO: 948 - protein, 86 aa, Chilobrachys jingzhao
MKVSVLITLAVLGVMFVWASAAELEERGSDQRDSPAWLKSMERIFRSEERECRKMFGGCSVDSDCCAHLGCKPTLKYCAWDGTFGK

SEQ ID NO: 949 - protein, 86 aa, Chilobrachys jingzhao
MKVSVLITLAVLGVMFVWASAAELEERGSDQRDSPAWLKSMERIFQSEERECRKMFGGCSVDSDCCAHLGCKPTLKYCAWDGTFGK

SEQ ID NO: 950 - protein, 83 aa, Chilobrachys jingzhao
MKGSAFAIILGLVVLCACSFAEDEQDQFASPNELLRSMFLESRHELIPEVEGRYCQKWMWTCDSERKCCEGYVCELWCKYNLG

SEQ ID NO: 951 - protein, 62 aa, Chilobrachys jingzhao; identical to SEQ ID NO: 734

SEQ ID NO: 952 - protein, 62 aa, Chilobrachys jingzhao
MKTSILFVIFSLALVFALSPATEIEETDRACGQFWWKCGEGKPPCCANFACKIGLYLCIWSP

SEQ ID NO: 953 - protein, 63 aa, Chilobrachys jingzhao
MKSTSILFILGLALLLVLAFEVQVGESDGECGGFWWKCGSGKPACCPKYVCSPKWGLCNFPMP

SEQ ID NO: 954 - protein, 77 aa, Chilobrachys jingzhao
MKTSVLLVILGIAAITVQCTASESVKQDSLRTFVDAVLGWNAEMASEARCGGWMAKCADSDDCCETFHCTRFNVCGK

SEQ ID NO: 955 - protein, 50 aa, Chilobrachys jingzhao
MYDEILSAFFEVNDELQSEARCGEKNDRCKTNQDCCSGFRCTKFRRCGRR

SEQ ID NO: 956 - protein, 35 aa, Grammostola rosea
GCLEFWWKCNPNDDKCCRPKLKCSKLFKLCNFSSG

SEQ ID NO: 957 - protein, 39 aa, Aphonopelma sp.
LFECVLSCDIKKNGKPCKPKGEKKCSGGWRCKINFCLKV

SEQ ID NO: 958 - protein, 78 aa, Atrax robustus; identical to SEQ ID NO: 598

SEQ ID NO: 959 - protein, 98 aa, Hadronyche versuta
MKFSKLSLTLALILTQAIFVLCGKINEDFMKNDLESQALHDEIRKPIDSENPDTERLLDCLLDNRVCSSDKDCCGMTPSCTMGLCVPSVGGLVGGILG

SEQ ID NO: 960 - protein, 98 aa, Atrax robustus; identical to SEQ ID NO: 535

SEQ ID NO: 961 - protein, 98 aa, Hadronyche versuta; identical to SEQ ID NO: 537

SEQ ID NO: 962 - protein, 98 aa, Hadronyche versuta; identical to SEQ ID NO: 538

SEQ ID NO: 963 - protein, 98 aa, Hadronyche versuta; identical to SEQ ID NO: 539

SEQ ID NO: 964 - protein, 98 aa, Hadronyche versuta; identical to SEQ ID NO: 540

SEQ ID NO: 965 - protein, 93 aa, Hadronyche versuta; identical to SEQ ID NO: 541

SEQ ID NO: 966 - protein, 98 aa, Hadronyche versuta; identical to SEQ ID NO: 543

SEQ ID NO: 967 - protein, 98 aa, Atrax robustus; identical to SEQ ID NO: 542

SEQ ID NO: 968 - protein, 98 aa, Hadronyche versuta; identical to SEQ ID NO: 544

SEQ ID NO: 969 - protein, 98 aa, Hadronyche versuta; identical to SEQ ID NO: 549

SEQ ID NO: 970 - protein, 96 aa, Atrax robustus; identical to SEQ ID NO: 550

SEQ ID NO: 971 - protein, 98 aa, Hadronyche versuta; identical to SEQ ID NO: 547

SEQ ID NO: 972 - protein, 98 aa, Hadronyche versuta; identical to SEQ ID NO: 548

SEQ ID NO: 973 - protein, 93 aa, Hadronyche versuta; identical to SEQ ID NO: 546

SEQ ID NO: 974 - protein, 97 aa, Hadronyche versuta; identical to SEQ ID NO: 545

SEQ ID NO: 975 - protein, 96 aa, Atrax robustus; identical to SEQ ID NO: 551

SEQ ID NO: 976 - protein, 101 aa, Hadronyche versuta; identical to SEQ ID NO: 552

SEQ ID NO: 977 - protein, 101 aa, Hadronyche versuta; identical to SEQ ID NO: 553

SEQ ID NO: 978 - protein, 101 aa, Hadronyche versuta; identical to SEQ ID NO: 554

SEQ ID NO: 979 - protein, 101 aa, Hadronyche versuta; identical to SEQ ID NO: 557

SEQ ID NO: 980 - protein, 101 aa, Hadronyche versuta; identical to SEQ ID NO: 558

SEQ ID NO: 981 - protein, 100 aa, Hadronyche infensa
MKFSKLSLTLALILTQALFVLCGKINEDFMEHGLESHALHDEIRKPITEKADAERLVDCVVNTLGCSSDKDCCGMTPSCTLGICAPSVGGLVGGLLGRAL

SEQ ID NO: 982 - protein, 101 aa, Hadronyche infensa; identical to SEQ ID NO: 556

SEQ ID NO: 983 - protein, 100 aa, Hadronyche versuta; identical to SEQ ID NO: 559

SEQ ID NO: 984 - protein, 97 aa, Atrax robustus; identical to SEQ ID NO: 560

SEQ ID NO: 985 - protein, 97 aa, Atrax robustus; identical to SEQ ID NO: 561

SEQ ID NO: 986 - protein, 101 aa, Hadronyche versuta; identical to SEQ ID NO: 562

SEQ ID NO: 987 - protein, 101 aa, Hadronyche versuta; identical to SEQ ID NO: 563

SEQ ID NO: 988 - protein, 101 aa, Hadronyche versuta; identical to SEQ ID NO: 564

SEQ ID NO: 989 - protein, 101 aa, Hadronyche versuta; identical to SEQ ID NO: 565

SEQ ID NO: 990 - protein, 101 aa, Hadronyche versuta; identical to SEQ ID NO: 566

SEQ ID NO: 991 - protein, 101 aa, Hadronyche versuta; identical to SEQ ID NO: 567

SEQ ID NO: 992 - protein, 95 aa, Hadronyche versuta; identical to SEQ ID NO: 568

SEQ ID NO: 993 - protein, 29 aa, Eucratoscelus constrictus
YCQKFLWTCDTERKCCEDMVCELWCKYKE

SEQ ID NO: 994 - protein, 29 aa, Eucratoscelus constrictus
YCQFKMWTCDSERKCCEDMVCRLWCKLNL

SEQ ID NO: 995 - protein, 63 aa, Agelena orientalis
LLLISAMVGSMIAAVPEEESLQLSEDERGGCLPHNRFCNALSGPRCCSGLTCKELNIWASKCL

SEQ ID NO: 996 - protein, 27 aa, Conus amadis
  MISC_FEATURE (27)..(27): Xaa is Ala, Arg, Asn, Asp, Asx, Cys, Glu, Gln, Glx, Gly, His, Ile, Leu, Lys, Met, Phe, Pro, Ser, Thr, Trp, Tyr, or Val.
CKQAGESCDIFSQNCCVGTCAFICIEX

SEQ ID NO: 997 - protein, 28 aa, Conus catus
  MISC_FEATURE (28)..(28): Xaa is Ala, Arg, Asn, Asp, Asx, Cys, Glu, Gln, Glx, Gly, His, Ile, Leu, Lys, Met, Phe, Pro, Ser, Thr, Trp, Tyr, or Val.
CKSKGAKCSKLMYDCCSGSCSGTVGRCX

SEQ ID NO: 998 - protein, 33 aa, Conus ermineus
  MISC_FEATURE (6)..(6): Xaa is Ala, Arg, Asn, Asp, Asx, Cys, Glu, Gln, Glx, Gly, His, Ile, Leu, Lys, Met, Phe, Pro, Ser, Thr, Trp, Tyr, or Val.
  MISC_FEATURE (33)..(33): Xaa is Ala, Arg, Asn, Asp, Asx, Cys, Glu, Gln, Glx, Gly, His, Ile, Leu, Lys, Met, Phe, Pro, Ser, Thr, Trp, Tyr, or Val.
DDCIKXYGFCSLPILKNGLCCSGACVGVCADLX

SEQ ID NO: 999 - protein, 33 aa, Conus ermineus; identical to SEQ ID NO: 998
  MISC_FEATURE (6)..(6): Xaa is Ala, Arg, Asn, Asp, Asx, Cys, Glu, Gln, Glx, Gly, His, Ile, Leu, Lys, Met, Phe, Pro, Ser, Thr, Trp, Tyr, or Val.
  MISC_FEATURE (33)..(33): Xaa is Ala, Arg, Asn, Asp, Asx, Cys, Glu, Gln, Glx, Gly, His, Ile, Leu, Lys, Met, Phe, Pro, Ser, Thr, Trp, Tyr, or Val.

SEQ ID NO: 1000 - protein, 34 aa, Conus geographus
ACSGRGSRCPPQCCMGLRCGRGNPQKCIGAHEDV

SEQ ID NO: 1001 - protein, 23 aa, Conus geographus
  MISC_FEATURE (23)..(23): Xaa is Ala, Arg, Asn, Asp, Asx, Cys, Glu, Gln, Glx, Gly, His, Ile, Leu, Lys, Met, Phe, Pro, Ser, Thr, Trp, Tyr, or Val.
RDCCTPPRKCKDRRCKPMKCCAX

SEQ ID NO: 1002 - protein, 28 aa, Conus geographus
  MISC_FEATURE (28)..(28): Xaa is Ala, Arg, Asn, Asp, Asx, Cys, Glu, Gln, Glx, Gly, His, Ile, Leu, Lys, Met, Phe, Pro, Ser, Thr, Trp, Tyr, or Val.
CKSPGSSCSPTSYNCCRSCNPYTKRCYX

SEQ ID NO: 1003 - protein, 23 aa, Conus geographus
  MISC_FEATURE (23)..(23): Xaa is Ala, Arg, Asn, Asp, Asx, Cys, Glu, Gln, Glx, Gly, His, Ile, Leu, Lys, Met, Phe, Pro, Ser, Thr, Trp, Tyr, or Val.
RDCCTPPKKCKDRQCKPQRCCAX

SEQ ID NO: 1004 - protein, 23 aa, Conus geographus
  MISC_FEATURE (23)..(23): Xaa is Ala, Arg, Asn, Asp, Asx, Cys, Glu, Gln, Glx, Gly, His, Ile, Leu, Lys, Met, Phe, Pro, Ser, Thr, Trp, Tyr, or Val.
RDCCTPPKKCKDRQCKPQRCCAX

SEQ ID NO: 1005 - protein, 28 aa, Conus geographus
  MISC_FEATURE (28)..(28): Xaa is Ala, Arg, Asn, Asp, Asx, Cys, Glu, Gln, Glx, Gly, His, Ile, Leu, Lys, Met, Phe, Pro, Ser, Thr, Trp, Tyr, or Val.
CKSPGSSCSPTSYNCCRSCNPYTKRCYX

SEQ ID NO: 1006 - protein, 28 aa, Conus geographus
  MISC_FEATURE (28)..(28): Xaa is Ala, Arg, Asn, Asp, Asx, Cys, Glu, Gln, Glx, Gly, His, Ile, Leu, Lys, Met, Phe, Pro, Ser, Thr, Trp, Tyr, or Val.
CKSPGSSCSPTSYNCCRSCNPYTKRCYX

SEQ ID NO: 1007 - protein, 23 aa, Conus geographus
  MISC_FEATURE (23)..(23): Xaa is Ala, Arg, Asn, Asp, Asx, Cys, Glu, Gln, Glx, Gly, His, Ile, Leu, Lys, Met, Phe, Pro, Ser, Thr, Trp, Tyr, or Val.
RDCCTPPKKCKDRQCKPQRCCAX

SEQ ID NO: 1008 - protein, 23 aa, Conus geographus
  MISC_FEATURE (23)..(23): Xaa is Ala, Arg, Asn, Asp, Asx, Cys, Glu, Gln, Glx, Gly, His, Ile, Leu, Lys, Met, Phe, Pro, Ser, Thr, Trp, Tyr, or Val.
RDCCTPPKKCKDRQCKPQRCCAX

SEQ ID NO: 1009 - protein, 28 aa, Conus gloriamaris
  MISC_FEATURE (28)..(28): Xaa is Ala, Arg, Asn, Asp, Asx, Cys, Glu, Gln, Glx, Gly, His, Ile, Leu, Lys, Met, Phe, Pro, Ser, Thr, Trp, Tyr, or Val.
SCNNSCQSHSDCASHCICTFRGCGAVNX

SEQ ID NO: 1010 - protein, 17 aa, Conus kinoshitai
  MISC_FEATURE (17)..(17): Xaa is Ala, Arg, Asn, Asp, Asx, Cys, Glu, Gln, Glx, Gly, His, Ile, Leu, Lys, Met, Phe, Pro, Ser, Thr, Trp, Tyr, or Val.
CCNCSSKWCRDHSRCCX

SEQ ID NO: 1011 - protein, 26 aa, Conus magus
  MISC_FEATURE (26)..(26): Xaa is Ala, Arg, Asn, Asp, Asx, Cys, Glu, Gln, Glx, Gly, His, Ile, Leu, Lys, Met, Phe, Pro, Ser, Thr, Trp, Tyr, or Val.
CKGKGAKCSRLMYDCCTGSCRSGKCX

SEQ ID NO: 1012 - protein, 26 aa, Conus magus
  MISC_FEATURE (26)..(26): Xaa is Ala, Arg, Asn, Asp, Asx, Cys, Glu, Gln, Glx, Gly, His, Ile, Leu, Lys, Met, Phe, Pro, Ser, Thr, Trp, Tyr, or Val.
CKGKGAKCSRLMYDCCTGSCRSGKCX

SEQ ID NO: 1013 - protein, 26 aa, Conus magus
  MISC_FEATURE (26)..(26): Xaa is Ala, Arg, Asn, Asp, Asx, Cys, Glu, Gln, Glx, Gly, His, Ile, Leu, Lys, Met, Phe, Pro, Ser, Thr, Trp, Tyr, or Val.
CKGKGAKCSRLMYDCCTGSCRSGKCX

SEQ ID NO: 1014 - protein, 26 aa, Conus magus
  MISC_FEATURE (26)..(26): Xaa is Ala, Arg, Asn, Asp, Asx, Cys, Glu, Gln, Glx, Gly, His, Ile, Leu, Lys, Met, Phe, Pro, Ser, Thr, Trp, Tyr, or Val.
CKGKGAKCSRLMYDCCTGSCRSGKCX

SEQ ID NO: 1015 - protein, 26 aa, Conus magus
  MISC_FEATURE (26)..(26): Xaa is Ala, Arg, Asn, Asp, Asx, Cys, Glu, Gln, Glx, Gly, His, Ile, Leu, Lys, Met, Phe, Pro, Ser, Thr, Trp, Tyr, or Val.
CKGKGAKCSRLMYDCCTGSCRSGKCX

SEQ ID NO: 1016 - protein, 31 aa, Conus marmoreus
ACSKKWEYCIVPILGFVYCCPGLICGPFVCV

SEQ ID NO: 1017 - protein, 15 aa, Conus marmoreus
DWEYHAHPKPNSFWT

SEQ ID NO: 1018 - protein, 16 aa, Conus marmoreus
CCAPSACRLGCRPCCR

SEQ ID NO: 1019 - protein, 16 aa, Conus marmoreus
CCAPSACRLGCRPCCR

SEQ ID NO: 1020 - protein, 28 aa, Conus purpurascens
  MISC_FEATURE (28)..(28): Xaa is Ala, Arg, Asn, Asp, Asx, Cys, Glu, Gln, Glx, Gly, His, Ile, Leu, Lys, Met, Phe, Pro, Ser, Thr, Trp, Tyr, or Val.
CRIPNQKCFQHLDDCCSRKCNRFNKCVX

SEQ ID NO: 1021 - protein, 25 aa, Conus purpurascens
  MISC_FEATURE (25)..(25): Xaa is Ala, Arg, Asn, Asp, Asx, Cys, Glu, Gln, Glx, Gly, His, Ile, Leu, Lys, Met, Phe, Pro, Ser, Thr, Trp, Tyr, or Val.
HPPCCLYGKCRRYPGCSSASCCQRX

SEQ ID NO: 1022 - protein, 28 aa, Conus purpurascens
  MISC_FEATURE (28)..(28): Xaa is Ala, Arg, Asn, Asp, Asx, Cys, Glu, Gln, Glx, Gly, His, Ile, Leu, Lys, Met, Phe, Pro, Ser, Thr, Trp, Tyr, or Val.
CRIPNQKCFQHLDDCCSRKCNRFNKCVX

SEQ ID NO: 1023 - protein, 25 aa, Conus purpurascens
  MISC_FEATURE (25)..(25): Xaa is Ala, Arg, Asn, Asp, Asx, Cys, Glu, Gln, Glx, Gly, His, Ile, Leu, Lys, Met, Phe, Pro, Ser, Thr, Trp, Tyr, or Val.
HPPCCLYGKCRRYPGCSSASCCQRX

SEQ ID NO: 1024 - protein, 25 aa, Conus purpurascens
  MISC_FEATURE (25)..(25): Xaa is Ala, Arg, Asn, Asp, Asx, Cys, Glu, Gln, Glx, Gly, His, Ile, Leu, Lys, Met, Phe, Pro, Ser, Thr, Trp, Tyr, or Val.
GPPCCLYGSCRPFPGCYNALCCRKX

SEQ ID NO: 1025 - protein, 23 aa, Conus purpurascens
  MISC_FEATURE (23)..(23): Xaa is Ala, Arg, Asn, Asp, Asx, Cys, Glu, Gln, Glx, Gly, His, Ile, Leu, Lys, Met, Phe, Pro, Ser, Thr, Trp, Tyr, or Val.
QRLCCGFPKSCRSRQCKPHRCCX

SEQ ID NO: 1026 - protein, 22 aa, Conus stercusmuscarum
QRCCNGRRGCSSRWCRDHSRCC

SEQ ID NO: 1027 - protein, 26 aa, Conus striatus
  MISC_FEATURE (26)..(26): Xaa is Ala, Arg, Asn, Asp, Asx, Cys, Glu, Gln, Glx, Gly, His, Ile, Leu, Lys, Met, Phe, Pro, Ser, Thr, Trp, Tyr, or Val.
CKAAGKPCSRIAYNCCTGSCRSGKCX

SEQ ID NO: 1028 - protein, 27 aa, Conus striatus
  MISC_FEATURE (27)..(27): Xaa is Ala, Arg, Asn, Asp, Asx, Cys, Glu, Gln, Glx, Gly, His, Ile, Leu, Lys, Met, Phe, Pro, Ser, Thr, Trp, Tyr, or Val.
CKLKGQSCRKTSYDCCSGSCGRSGKCX

SEQ ID NO: 1029 - protein, 21 aa, Conus striatus
  MISC_FEATURE (21)..(21): Xaa is Ala, Arg, Asn, Asp, Asx, Cys, Glu, Gln, Glx, Gly, His, Ile, Leu, Lys, Met, Phe, Pro, Ser, Thr, Trp, Tyr, or Val.
QNCCNGGCSSKWCRDHARCCX

SEQ ID NO: 1030 - protein, 26 aa, Conus textile
CKQADEPCDVFSLDCCTGICLGVCMW

SEQ ID NO: 1031 - protein, 27 aa, Conus textile
WCKQSGEMCNLLDQNCCDGYCIVLVCT

SEQ ID NO: 1032 - protein, 30 aa, Conus tulipa
SCSGRDSRCPPVCCMGLMCSRGKCVSIYGE

SEQ ID NO: 1033 - protein, 23 aa, Conus tulipa
  MISC_FEATURE (23)..(23): Xaa is Ala, Arg, Asn, Asp, Asx, Cys, Glu, Gln, Glx, Gly, His, Ile, Leu, Lys, Met, Phe, Pro, Ser, Thr, Trp, Tyr, or Val.
RHGCCKGPKGCSSRECRPQHCCX

SEQ ID NO: 1034 - protein, 21 aa, Striated cone
  MISC_FEATURE (21)..(21): Xaa is Ala, Arg, Asn, Asp, Asx, Cys, Glu, Gln, Glx, Gly, His, Ile, Leu, Lys, Met, Phe, Pro, Ser, Thr, Trp, Tyr, or Val.
QNCCNGGCSSKWCRDHARCCX

SEQ ID NO: 1035 - protein, 24 aa, Hordeum vulgare
MANKHLSLSLFLVLLGLSASLASG

SEQ ID NO: 1036 - protein, 238 aa, Aequorea victoria; identical to SEQ ID NO: 7

SEQ ID NO: 1037 - protein, 4 aa, Pisum sativum
IGER

SEQ ID NO: 1038 - protein, 305 aa, Hadronyche versuta; identical to SEQ ID NO: 11

SEQ ID NO: 1039 - protein, 282 aa, Hadronyche versuta; identical to SEQ ID NO: 10

SEQ ID NO: 1040 - protein, 61 aa, Hadronyche versuta; identical to SEQ ID NO: 9

SEQ ID NO: 1041 - protein, 38 aa, Hadronyche versuta; identical to SEQ ID NO: 8

SEQ ID NO: 1042 - protein, 41 aa, Hadronyche versuta; identical to SEQ ID NO: 5

SEQ ID NO: 1043 - protein, 32 aa, Phoneutria nigriventer; identical to SEQ ID NO: 774

SEQ ID NO: 1044 - protein, 31 aa, Phoneutria nigriventer; identical to SEQ ID NO: 787

SEQ ID NO: 1045 - protein, 33 aa, Phoneutria nigriventer; identical to SEQ ID NO: 760

SEQ ID NO: 1046 - protein, 35 aa, Allagelena opulenta; identical to SEQ ID NO: 805

SEQ ID NO: 1047 - protein, 68 aa, Cupiennius salei
KDDKNCIPKHHECTNDKKNCCKKGLTKMKCKCFTVADAKGATSERCACDSSLLQKFGFTGLHIIKGLF

SEQ ID NO: 1048 - protein, 80 aa, Calisoga sp.
MKYFVVFCVLIIAVAAFTSAAEDGEVFEENPLEFPKTIQKRCISARYPCSNSKDCCSGNCGTFWTCYIRKDPCSKECLAP

SEQ ID NO: 1049 - protein, 39 aa, Calisoga sp.
CISARYPCSNSKDCCSGNCGTFWTCFIRKDPCSKECLAP

SEQ ID NO: 1050 - protein, 39 aa, Calisoga sp.
CISARYPCSNSKDCCSGSCGIFWTCYLRKDPCSKECLAP

SEQ ID NO: 1051 - protein, 82 aa, Plectreurys tristis
MKHLIFSSALVCALVVCTFAEEQVNVPFLPDERAVKCIGWQETCNGNLPCCNECVMCECNIMGQNCRCNHPKATNECESRRR

SEQ ID NO: 1052 - protein, 61 aa, Plectreurys tristis
EEQVNVPFLPDERAVKCIGWQETCNGQLPCCDGCVMCECNIMGQNCRCNHPKMTSECGSRR

SEQ ID NO: 1053 - protein, 79 aa, Plectreurys tristis
HLILASALICALVVCTFAEEQVNVPFLPDEREVKCIGWQEYCRGNLPCCDDCVMCECNIMGQNCRCNHPRITSECGSRR

SEQ ID NO: 1054 - protein, 45 aa, Plectreurys tristis
AVKCIGWQETCNGNLPCCNECVMCECNIMGQNCRCNHPKATNECE

SEQ ID NO: 1055 - protein, 46 aa, Plectreurys tristis
AVKCIGWQETCNGKLPCCDGCVMCECNIMGQNCRCNHPKATSECES

SEQ ID NO: 1056 - protein, 31 aa, Coremiocnemis valida; identical to SEQ ID NO: 857

SEQ ID NO: 1057 - protein, 85 aa, Haplopelma huwenum; identical to SEQ ID NO: 817

SEQ ID NO: 1058 - protein, 84 aa, Haplopelma huwenum; identical to SEQ ID NO: 904

SEQ ID NO: 1059 - protein, 85 aa, Haplopelma huwenum; identical to SEQ ID NO: 905

SEQ ID NO: 1060 - protein, 37 aa, Haplopelma huwenum; identical to SEQ ID NO: 818

SEQ ID NO: 1061 - protein, 85 aa, Haplopelma huwenum; identical to SEQ ID NO: 862

SEQ ID NO: 1062 - protein, 84 aa, Haplopelma huwenum; identical to SEQ ID NO: 906

SEQ ID NO: 1063 - protein, 85 aa, Haplopelma huwenum; identical to SEQ ID NO: 911

SEQ ID NO: 1064 - protein, 85 aa, Haplopelma huwenum; identical to SEQ ID NO: 872

SEQ ID NO: 1065 - protein, 83 aa, Haplopelma huwenum; identical to SEQ ID NO: 823

SEQ ID NO: 1066 - protein, 84 aa, Haplopelma huwenum; identical to SEQ ID NO: 907

SEQ ID NO: 1067 - protein, 84 aa, Haplopelma huwenum; identical to SEQ ID NO: 908

SEQ ID NO: 1068 - protein, 83 aa, Haplopelma huwenum; identical to SEQ ID NO: 823

SEQ ID NO: 1069 - protein, 84 aa, Haplopelma huwenum; identical to SEQ ID NO: 870

SEQ ID NO: 1070 - protein, 70 aa, Agelena orientalis; identical to SEQ ID NO: 806

SEQ ID NO: 1071 - protein, 35 aa, Allagelena opulenta; identical to SEQ ID NO: 805

SEQ ID NO: 1072 - protein, 63 aa, Cupiennius salei
SDCTLRNHDCTDDRHSCCRSKMFKDVCTCFYPSQAKKELCTCQQPKHLKYIEKGLQKAKDYAT

SEQ ID NO: 1073 - protein, 88 aa, Cupiennius salei
MKVAILILSILVLAVASETIEEYRDDFAVEELERATCAGQDKPCKETCDCCGERGECVCALSYEGKYRCICRQGNFLIAWHKLASCKK

SEQ ID NO: 1074 - protein, 37 aa, Phoneutria nigriventer
CNSKGTPCTNADECCGGKCAYNVWNCIGGGCSKTCGY

SEQ ID NO: 1075 - protein, 46 aa, Apomastus schlingeri
KECMTDGTVCYIHNHNDCCGSCLCSNGPIARPWEMMVGNCMCGPKA

SEQ ID NO: 1076 - protein, 46 aa, Segestria florentina
KECMADETVCYIHNHNNCCGSCLCLNGPYARPWEMLVGNCKCGPKE

SEQ ID NO: 1077 - protein, 46 aa, Segestria florentina
KECMVDGTVCYIHNHNDCCGSCLCLNGPIARPWEMMVGNCKCGPKA

SEQ ID NO: 1078 - protein, 46 aa, Segestria florentina
KECMVDGTVCYIHNHNDCCGSCLCLNGPIARPWKMMVGNCKCGPKA

SEQ ID NO: 1079 - protein, 46 aa, Segestria florentina
KECMVDGTVCYIHNHNDCCGSCLCPNGPLARPWEMLVGNCKCGPKA

SEQ ID NO: 1080 - protein, 46 aa, Segestria florentina
KECMTDETVCYIHNHNDCCGSCLCLNGPIARPWEMMVGNCKCGPKA

SEQ ID NO: 1081 - protein, 46 aa, Segestria florentina
KECMADGTVCYIHNHNDCCGSCLCPNGPLARPWEVLVGNCKCGPKA

SEQ ID NO: 1082 - protein, 92 aa, Segestria florentina
KECMADGTVCYIHNHNDCCGSCLCPNGPLARPWEMLVGNCKCGPKAKECMADGTVCYIHNHNDCCGSCLCPNGPLARPWEMLVGNCKCGPKA

SEQ ID NO: 1083 - protein, 87 aa, Haplopelma huwenum; identical to SEQ ID NO: 819

SEQ ID NO: 1084 - protein, 32 aa, Apomastus schlingeri; identical to SEQ ID NO: 851

SEQ ID NO: 1085 - protein, 49 aa, Plectreurys tristis
GCKGFLVKCDSNSECCKTAIVKGKKKQLSCLCGAWGAGCSCSFRCGNRC

SEQ ID NO: 1086 - protein, 32 aa, Phoneutria nigriventer; identical to SEQ ID NO: 790

SEQ ID NO: 1087 - protein, 54 aa, Phoneutria keyserlingi
ATCAGQDKPCKETCDCCGERGECVCGLSYEGKYRCICRQGTFLIAWYKLASCKK

SEQ ID NO: 1088 - protein, 79 aa, Macrothele gigas; identical to SEQ ID NO: 840

SEQ ID NO: 1089 - protein, 29 aa, Macrothele raveni
GCKLTFWKCKNKKECCGWNACALGICMPR

SEQ ID NO: 1090 - protein, 81 aa, Phoneutria nigriventer
MKVAIVFLSLLVLAFASESIEENREEFPVEESARCADINGACKSDCDCCGDSVTCDCYWSDSCKCRESNFKIGMAIRKKFC

SEQ ID NO: 1091 - protein, 42 aa, Missulena bradleyi
CAKKREWCAKTEDCCCPMKCIYAWYNEQSSCQTTFSGMFKKC

SEQ ID NO: 1092 - protein, 37 aa, Pireneitega luctuosa
GCLGEGEKCADWSGPSCCDGFYCSCRSMPYCRCRNNS

SEQ ID NO: 1093 - protein, 37 aa, Pireneitega luctuosa
ACVGDGQRCASWSGPYCCDGYYCSCRSMPYCRCRNNS

SEQ ID NO: 1094 - protein, 36 aa, Pirenitega luctuosa
ADCLNEGDWCADWSGPSCCGEMWCSCPGFGKCRCKK

SEQ ID NO: 1095 - protein, 37 aa, Pireneitega luctuosa
ACATKNQRCASWAGPYCCDGFYCSCRSYPGCMCRPNS

SEQ ID NO: 1096 - protein, 47 aa, Ancylometes sp.
ATCAGQDKPCKVNCDCCGERGECVCGGPCICRQGNVFIAWSKLMTCK

SEQ ID NO: 1097 - protein, 48 aa, Phoneutria nigriventer
CGDINAACKEDCDCCGYTTACDCYWSKSCKCREAAIVIYTAPKKKLTC

SEQ ID NO: 1098 - protein, 82 aa, Phoneutria nigriventer
MKVAIVFLSLLVLAFASESIEENREEFPVEESARCGDINAACKEDCDCCGYTTACDCYWSKSCKCREAAIVIYTAPKKKLTC

SEQ ID NO: 1099 - protein, 48 aa, Phoneutria nigriventer
CGDINAACKEDCDCCGYTTACDCYWSSSCKCREAAIVIYTAPKKKLTC

SEQ ID NO: 1100 - protein, 82 aa, Phoneutria nigriventer
MKVAILFLSILVLAVASESIEESRDDFAVEELGRATCAGQDQPCKETCDCCGERGECVCGGPCICRQGYFWIAWYKLANCKK

SEQ ID NO: 1101 - protein, 49 aa, Phoneutria nigriventer
ATCAGQDQTCKVTCDCCGERGECVCGGPCICRQGNFLIAAYKLASCKCK

SEQ ID NO: 1102 - protein, 82 aa, Phoneutria nigriventer
MKVAILFLSILVLAVASESIEESRDDFAVEELGRATCAGQDQTCKVTCDCCGERGECVCGGPCICRQGNFLIAWYKLASCKK

SEQ ID NO: 1103 - protein, 47 aa, Phoneutria reidyi
GTCAGQDKPCKETCDCCGERGQCVCEGPCICRQGYFWIAAYKLGNCK

SEQ ID NO: 1104 - protein, 42 aa, Atrax robustus
CAKKRNWCGKNEDCCCPMKCIYAWYNQQGSCQTTITGLFKKC

SEQ ID NO: 1105 - protein, 42 aa, Hadronyche versuta
CAKKRNWCGKTEDCCCPMKCVYAWYNEQGSCQSTISALWKKC

SEQ ID NO: 1106 - protein, 42 aa, Hadronyche versuta
CSRSDGWCGKTEDCCCPMKCIKAWYKQNGNCQNTISAIWKNC

SEQ ID NO: 1107 - protein, 42 aa, Illawara wisharti
CAKKRNWCGKNEDCCCPMKCIYAWYNQQGSCQSTITGLFKKC

SEQ ID NO: 1108 - protein, 105 aa, Macrothele gigas
MKTLVIACVALVLVVVHGEVIEEVNEKQLQESVEEKYSLLQRLEKLDEAITAEENRNSRVRRCGSKRAWCKEKKDCCCGYNCVYAWYNQQSSCERKWKYLFTGEC

SEQ ID NO: 1109 - protein, 70 aa, Macrothele gigas
MKILEKALLENDSAAEEESRNLRTKRCARKRAWCEKTENCCCPMKCIYAWYNGQSSCDHTISTIWTSCPK

SEQ ID NO: 1110 - protein, 37 aa, Hadronyche formidabilis; identical to SEQ ID NO: 629

SEQ ID NO: 1111 - protein, 36 aa, Hadronyche versuta
TICTGADRPCAACCPCCPGTSCQGPESNGVVYCRNF

SEQ ID NO: 1112 - protein, 36 aa, Hadronyche versuta
TICTGADRPCAACCPCCPGTSCQGPEPNGVSYCRND

SEQ ID NO: 1113 - protein, 37 aa, Hadronyche versuta
AICTGADRPCAACCPCCPGTSCKAESNGVSYCRKDEP

SEQ ID NO: 1114 - protein, 74 aa, Hadronyche versuta
MNTATCFIVLLDVATVIGGIEAGESDMRKDVMGLFRRAICTGADRPCAACCPCCPGTSCKAESNGVSYCRKDEP

SEQ ID NO: 1115 - protein, 74 aa, Hadronyche versuta
MNTATCFIVLLVVATVIGGIEAGEFDMRKDVMGLFRRAICTGADRPCAACCPCCPGTSCKAESNGVSYCRKDEP

SEQ ID NO: 1116 - protein, 74 aa, Hadronyche versuta
MNTATCFIVFLVVATVIGGIEAGESDMRKDVMGLFRRAICTGADRPCAACCPCCPGTSCKAESNGVSYCRKDEP

SEQ ID NO: 1117 - protein, 74 aa, Hadronyche versuta
MNTATCFIVLLVVATVIGGIEAGESDMRKDVMGLFRRVICTGADSPCAACCPCCPGTSCKAESNGVSYCRKDEP

SEQ ID NO: 1118 - protein, 74 aa, Hadronyche versuta
MNTATCFIVLLVVATVIGGIEAGEFDMRKDVMGLFRRAICPGADRPCAACCPCCPGTSCKAESNGVFYCRKDEP

SEQ ID NO: 1119 - protein, 29 aa, Eucratoscelus constrictus
YCQKFLWTCDTERKCCEDMVCELWCKLEK

SEQ ID NO: 1120 - protein, 29 aa, Eucratoscelus constrictus
YCQKFLWTCDTERKCCEDMVCELWCKYKE

SEQ ID NO: 1121 - protein, 36 aa, Agelenopsis aperta
ECVPENGHCRDWYDECCEGFYCSCRQPPKCICRNNN

SEQ ID NO: 1122 - protein, 37 aa, Agelenopsis aperta; identical to SEQ ID NO: 637

SEQ ID NO: 1123 - protein, 38 aa, Agelenopsis aperta; identical to SEQ ID NO: 638

SEQ ID NO: 1124 - protein, 37 aa, Agelenopsis aperta; identical to SEQ ID NO: 639

SEQ ID NO: 1125 - protein, 37 aa, Agelenopsis aperta; identical to SEQ ID NO: 640

SEQ ID NO: 1126 - protein, 37 aa, Hololena curta; identical to SEQ ID NO: 641

SEQ ID NO: 1127 - protein, 36 aa, Hololena curta; identical to SEQ ID NO: 642

SEQ ID NO: 1128 - protein, 38 aa, Hololena curta; identical to SEQ ID NO: 638

SEQ ID NO: 1129 - protein, 38 aa, Hololena curta; identical to SEQ ID NO: 643

SEQ ID NO: 1130 - protein, 94 aa, Diguetia canities
MKVFVVLLCLSLAAVYALEERLDKDADIMLDSPADMERAKDGDVEGPAGCKKYDVECDSGECCQKQYLWYKWRPLDCRCLKSGFFSSKCVCRDV

SEQ ID NO: 1131 - protein, 58 aa, Diguetia canities
AKDGDVKGPAGCMKYKSGDCRGKTCCDQQYLWYKWRNLACRCFTVEVFKKDCWCNDIS

SEQ ID NO: 1132 - protein, 121 aa, Macrothele gigas; identical to SEQ ID NO: 839

SEQ ID NO: 1133 - protein, 38 aa, Macrothele gigas; identical to SEQ ID NO: 838

SEQ ID NO: 1134 - protein, 99 aa, Macrothele gigas; identical to SEQ ID NO: 854

SEQ ID NO: 1135 - protein, 46 aa, Macrothele gigas
GGCIKWNHSCQTTTLKCCGKCVVCYCHTPWGTNCRCDRTRLFCTED

SEQ ID NO: 1136 - protein, 87 aa, Haplopelma huwenum; identical to SEQ ID NO: 819

SEQ ID NO: 1137 - protein, 39 aa, Missulena bradleyi; identical to SEQ ID NO: 762

SEQ ID NO: 1138 - protein, 48 aa, Agelenopsis aperta
KKKCIAKDYGRCKWGGTPCCRGRGCICSIMGTNCECKPRLIMEGLGLA

SEQ ID NO: 1139 - protein, 83 aa, Agelenopsis aperta
MKLCMTLLITAIAVVTFVVATQEESAEFNEVEESREDNCIAEDYGKCTWGGTKCCRGRPCRCSMIGTNCECTPRLIMEGLSFA

SEQ ID NO: 1140 - protein, 83 aa, Agelenopsis aperta; identical to SEQ ID NO: 1139

SEQ ID NO: 1141 - protein, 85 aa, Atrax robustus; identical to SEQ ID NO: 724

SEQ ID NO: 1142 - protein, 37 aa, Atrax robustus; identical to SEQ ID NO: 627

SEQ ID NO: 1143 - protein, 73 aa, Atrax robustus; identical to SEQ ID NO: 602

SEQ ID NO: 1144 - protein, 78 aa, Atrax robustus; identical to SEQ ID NO: 592

SEQ ID NO: 1145 - protein, 78 aa, Atrax robustus; identical to SEQ ID NO: 594

SEQ ID NO: 1146 - protein, 78 aa, Atrax robustus; identical to SEQ ID NO: 600

SEQ ID NO: 1147 - protein, 78 aa, Atrax robustus; identical to SEQ ID NO: 596

SEQ ID NO: 1148 - protein, 76 aa, Atrax robustus; identical to SEQ ID NO: 582

SEQ ID NO: 1149 - protein, 78 aa, Atrax robustus; identical to SEQ ID NO: 598

SEQ ID NO: 1150 - protein, 98 aa, Atrax robustus; identical to SEQ ID NO: 535

SEQ ID NO: 1151 - protein, 98 aa, Atrax robustus; identical to SEQ ID NO: 542

SEQ ID NO: 1152 - protein, 96 aa, Atrax robustus; identical to SEQ ID NO: 550

SEQ ID NO: 1153 - protein, 96 aa, Atrax robustus; identical to SEQ ID NO: 551

SEQ ID NO: 1154 - protein, 97 aa, Atrax robustus; identical to SEQ ID NO: 560

SEQ ID NO: 1155 - protein, 97 aa, Atrax robustus; identical to SEQ ID NO: 561

SEQ ID NO: 1156 - protein, 100 aa, Atrax sp. Illawarra
MKFSKLSITLAVILTQAVFVLCGMKNEDFMEKGLESNELHDAIKKPVNSGKPDTERLLDCVLSRVCSPDANCCGLTPICKMGLCVPKVGGLLGGLLGGIL

SEQ ID NO: 1157 - protein, 100 aa, Atrax sp. Illawarra
MKFSKLSITLAVILTQAVFVLCGMKNEDFMEKGLESNELHDAIKKPVNSGKPDTERLLDCVLSRVCSSDANCCGLTPTCKMGLCVPKVGGLLGGLLGGIL

SEQ ID NO: 1158 - protein, 37 aa, Hadronyche formidabilis; identical to SEQ ID NO: 631

SEQ ID NO: 1159 - protein, 36 aa, Hadronyche infensa; identical to SEQ ID NO: 615

SEQ ID NO: 1160 - protein, 78 aa, Hadronyche infensa; identical to SEQ ID NO: 620

SEQ ID NO: 1161 - protein, 78 aa, Hadronyche infensa; identical to SEQ ID NO: 614

SEQ ID NO: 1162 - protein, 37 aa, Hadronyche infensa; identical to SEQ ID NO: 609

SEQ ID NO: 1163 - protein, 79 aa, Hadronyche infensa; identical to SEQ ID NO: 918

SEQ ID NO: 1164 - protein, 79 aa, Hadronyche infensa; identical to SEQ ID NO: 608

SEQ ID NO: 1165 - protein, 79 aa, Hadronyche infensa; identical to SEQ ID NO: 610

SEQ ID NO: 1166 - protein, 79 aa, Hadronyche infensa; identical to SEQ ID NO: 917

SEQ ID NO: 1167 - protein, 37 aa, Hadronyche infensa; identical to SEQ ID NO: 613

SEQ ID NO: 1168 - protein, 78 aa, Hadronyche infensa; identical to SEQ ID NO: 612

SEQ ID NO: 1169 - protein, 37 aa, Hadronyche versuta
SPTCIPSGGPCPYNENCCSQSCTFKENENGNTVKRCD

SEQ ID NO: 1170 - protein, 37 aa, Hadronyche versuta; identical to SEQ ID NO: 767

SEQ ID NO: 1171 - protein, 37 aa, Hadronyche versuta; identical to SEQ ID NO: 769

SEQ ID NO: 1172 - protein, 37 aa, Hadronyche versuta; identical to SEQ ID NO: 601

SEQ ID NO: 1173 - protein, 37 aa, Hadronyche versuta; identical to SEQ ID NO: 771

SEQ ID NO: 1174 - protein, 37 aa, Hadronyche versuta; identical to SEQ ID NO: 772

SEQ ID NO: 1175 - protein, 76 aa, Hadronyche versuta; identical to SEQ ID NO: 582

SEQ ID NO: 1176 - protein, 76 aa, Hadronyche versuta; identical to SEQ ID NO: 580

SEQ ID NO: 1177 - protein, 76 aa, Hadronyche versuta; identical to SEQ ID NO: 584

SEQ ID NO: 1178 - protein, 45 aa, Hadronyche versuta; identical to SEQ ID NO: 589

SEQ ID NO: 1179 - protein, 98 aa, Hadronyche versuta; identical to SEQ ID NO: 959

SEQ ID NO: 1180 - protein, 98 aa, Hadronyche versuta; identical to SEQ ID NO: 537

SEQ ID NO: 1181 - protein, 98 aa, Hadronyche versuta; identical to SEQ ID NO: 538

SEQ ID NO: 1182 - protein, 98 aa, Hadronyche versuta; identical to SEQ ID NO: 539

SEQ ID NO: 1183 - protein, 98 aa, Hadronyche versuta; identical to SEQ ID NO: 540

SEQ ID NO: 1184 - protein, 93 aa, Hadronyche versuta; identical to SEQ ID NO: 541

SEQ ID NO: 1185 - protein, 98 aa, Hadronyche versuta; identical to SEQ ID NO: 543

SEQ ID NO: 1186 - protein, 98 aa, Hadronyche versuta; identical to SEQ ID NO: 544

SEQ ID NO: 1187 - protein, 98 aa, Hadronyche versuta; identical to SEQ ID NO: 548

SEQ ID NO: 1188 - protein, 93 aa, Hadronyche versuta; identical to SEQ ID NO: 546

SEQ ID NO: 1189 - protein, 97 aa, Hadronyche versuta; identical to SEQ ID NO: 545

SEQ ID NO: 1190 - protein, 98 aa, Hadronyche versuta; identical to SEQ ID NO: 549

SEQ ID NO: 1191 - protein, 98 aa, Hadronyche versuta; identical to SEQ ID NO: 547

SEQ ID NO: 1192 - protein, 101 aa, Hadronyche versuta; identical to SEQ ID NO: 552

SEQ ID NO: 1193 - protein, 101 aa, Hadronyche versuta; identical to SEQ ID NO: 553

SEQ ID NO: 1194 - protein, 101 aa, Hadronyche versuta; identical to SEQ ID NO: 557

SEQ ID NO: 1195 - protein, 101 aa, Hadronyche versuta; identical to SEQ ID NO: 554

SEQ ID NO: 1196 - protein, 101 aa, Hadronyche versuta; identical to SEQ ID NO: 558

SEQ ID NO: 1197 - protein, 95 aa, Hadronyche versuta; identical to SEQ ID NO: 568

SEQ ID NO: 1198 - protein, 100 aa, Hadronyche versuta; identical to SEQ ID NO: 559

SEQ ID NO: 1199 - protein, 101 aa, Hadronyche versuta; identical to SEQ ID NO: 562

SEQ ID NO: 1200 - protein, 101 aa, Hadronyche versuta; identical to SEQ ID NO: 563

SEQ ID NO: 1201 - protein, 101 aa, Hadronyche versuta; identical to SEQ ID NO: 566

SEQ ID NO: 1202 - protein, 101 aa, Hadronyche versuta; identical to SEQ ID NO: 567

SEQ ID NO: 1203 - protein, 101 aa, Hadronyche versuta; identical to SEQ ID NO: 564

SEQ ID NO: 1204 - protein, 101 aa, Hadronyche versuta; identical to SEQ ID NO: 565

SEQ ID NO: 1205 - protein, 83 aa, Hadronyche venenata; identical to SEQ ID NO: 878

SEQ ID NO: 1206 - protein, 84 aa, Hadronyche venenata; identical to SEQ ID NO: 879

SEQ ID NO: 1207 - protein, 84 aa, Hadronyche venenata; identical to SEQ ID NO: 880

SEQ ID NO: 1208 - protein, 84 aa, Hadronyche venenata; identical to SEQ ID NO: 881

SEQ ID NO: 1209 - protein, 84 aa, Hadronyche venenata; identical to SEQ ID NO: 882

SEQ ID NO: 1210 - protein, 84 aa, Hadronyche venenata; identical to SEQ ID NO: 883

SEQ ID NO: 1211 - protein, 100 aa, Illawara wisharti; identical to SEQ ID NO: 1156

SEQ ID NO: 1212 - protein, 55 aa, Oxyopes lineatus
AWKCLPKDSTCGDDCDCCEGLHCHCPLRNMLPAILRCSCQSKDDHINTCPKYKKS

SEQ ID NO: 1213 - protein, 44 aa, Plectreurys tristis
ADCSATGDTCDHTKKCCDDCYTCRCGTPWGANCRCDYYKARCDT

SEQ ID NO: 1214 - protein, 39 aa, Aphonopelma sp.; identical to SEQ ID NO: 957

SEQ ID NO: 1215 - protein, 39 aa, Aphonopelma sp.; identical to SEQ ID NO: 777

SEQ ID NO: 1216 - protein, 39 aa, Aphonopelma sp.; identical to SEQ ID NO: 792

SEQ ID NO: 1217 - protein, 39 aa, Brachypelma albiceps; identical to SEQ ID NO: 844

SEQ ID NO: 1218 - protein, 39 aa, Brachypelma albiceps; identical to SEQ ID NO: 848

SEQ ID NO: 1219 - protein, 39 aa, Brachypelma smithi; identical to SEQ ID NO: 792

SEQ ID NO: 1220 - protein, 99 aa, Brachypelma smithi; identical to SEQ ID NO: 868

SEQ ID NO: 1221 - protein, 86 aa, Haplopelma huwenum; identical to SEQ ID NO: 821

SEQ ID NO: 1222 - protein, 47 aa, Anemonia erythraea
GAPCLCANSGPNTRGNDLNGIVWVFGCPSGWHDCHGRAMVGYCCQED

SEQ ID NO: 1223 - protein, 42 aa, Anthopleura elegantissima
GTTCYCGKTIGIYWFGTKTCPSNRGYTGSCGYFLGICCYPVD

SEQ ID NO: 1224 - protein, 42 aa, Anthopleura elegantissima
GTACSCGNSKGIYWFYRPSCPTDRGYTGSCRYFLGTCCTPAD

SEQ ID NO: 1225 - protein, 43 aa, Anemonia sulcata
AAPCFCSGKPGRGDLWILRGTCPGGYGYTSNCYKWPNICCYPH

SEQ ID NO: 1226 - protein, 43 aa, Anemonia sulcata
AAPCFCPGKPDRGDLWILRGTCPGGYGYTSNCYKWPNICCYPH

SEQ ID NO: 1227 - protein, 48 aa, Bunodosoma granulifera
GASCRCDSDGPTSRGNTLTGTLWLIGRCPSGWHNCRGSGPFIGYCCKQ

SEQ ID NO: 1228 - protein, 48 aa, Bunodosoma granulifera
GASCRCDSDGPTSRGDTLTGTLWLIGRCPSGWHNCRGSGPFIGYCCKQ

SEQ ID NO: 1229 - protein, 47 aa, Anthopleura elegantissima
GIACLCDSDGPSVRGNTLSGTYWLAGCPSGWHNCKSSGQLIGACCKQ

SEQ ID NO: 1230 - protein, 47 aa, Anthopleura elegantissima
GVPCLCDSDGPNVRGNTLSGTYWLAGCPSGWHNCKSSGPLIGACCKQ

SEQ ID NO: 1231 - protein, 47 aa, Anemonia sulcata
GVACLCDSDGPNVRGNTLSGTIWLAGCPSGWHNCKAHGPTIGWCCKQ

SEQ ID NO: 1232 - protein, 47 aa, Anthopleura fuscoviridis; identical to SEQ ID NO: 1231

SEQ ID NO: 1233 - protein, 48 aa, HETERACTIS CRISPA
ASCKCDDDGPDVRSATFTGTVDFAYCNAGWEKCLAVYTPVASCCRKKK

SEQ ID NO: 1234 - protein, 48 aa, Stoichactis helianthus
AACKCDDEGPDIRTAPLTGTVDLGSCNAGWEKCASYYTIIADCCRKKK

SEQ ID NO: 1235 - protein, 47 aa, Anthopleura elegantissima
GVPCLCDSDGPSVRGNTLSGILWLAGCPSGWHNCKAHGPTIGWCCKQ

SEQ ID NO: 1236 - protein, 47 aa, Anthopleura elegantissima
GVPCLCDSDGPNVRGNTLSGILWLAGCPSGWHNCKAHGPTIGWCCKQ

SEQ ID NO: 1237 - protein, 47 aa, Anemonia sulcata
GVPCLCDSDGPSVRGNTLSGIIWLAGCPSGWHNCKKHGPTIGWCCKQ

SEQ ID NO: 1238 - protein, 48 aa, Anthopleura fuscoviridis
GGVPCLCDSDGPSVRGNTLSGIIWLAGCPSGWHNCKAHGPTIGWCCKQ

SEQ ID NO: 1239 - protein, 48 aa, Heteractis crispa
GTCKCDDDGPDVRTATFTGSTEFANCNESWEKCLAVYTPVASCCRKKK

SEQ ID NO: 1240 - protein, 48 aa, Radianthus paumotensis
ASCKCDDDGPDVRSATFTGTVDFWNCNEGWEKCTAVYTPVASCCRKKK

SEQ ID NO: 1241 - protein, 31 aa, Parasicyonis actinostoloides
AGGKSTCCPCAMCKYTAGCPWGQCAHHCGCS

SEQ ID NO: 1242 - protein, 48 aa, Heteractis crispa
GNCKCDDEGPYVRTAPLTGYVDLGYCNEGWEKCASYYSPIAECCRKKK

SEQ ID NO: 1243 - protein, 48 aa, Radianthus paumotensis
GNCKCDDEGPNVRTAPLTGYVDLGYCNEGWEKCASYYSPIAECCRKKK

SEQ ID NO: 1244 - protein, 48 aa, Heteractis crispa
GNCKCDDEGPNVRTAPLTGYVDLGYCNEGWDKCASYYSPIAECCRKKK

SEQ ID NO: 1245 - protein, 46 aa, Anemonia sulcata
GVPCLCDSDGPSVRGNTLSGILWLAGCPSGWHNCKKHKPTIGWCCK

SEQ ID NO: 1246 - protein, 47 aa, Heteractis crispa
GNCKCDDEGPNVRTAPLTGYVDLGYCNEGWEKCASYYSPIAECCRKK

SEQ ID NO: 1247 - protein, 49 aa, Anthopleura xanthogrammica
GVSCLCDSDGPSVRGNTLSGTLWLYPSGCPSGWHNCKAHGPTIGWCCKQ

SEQ ID NO: 1248 - protein, 49 aa, Anthopleura xanthogrammica
GVPCLCDSDGPRPRGNTLSGILWFYPSGCPSGWHNCKAHGPNIGWCCKK

SEQ ID NO: 1249 - protein, 47 aa, Anthopleura elegantissima; identical to SEQ ID NO: 1235

SEQ ID NO: 1250 - protein, 36 aa, Actinia equina
GCKDNFSANTCKHVKANNNCGSQKYATNCAKTCGKC

SEQ ID NO: 1251 - protein, 37 aa, Bunodosoma granulifera
VCRDWFKETACRHAKSLGNCRTSQKYRANCAKTCELC

SEQ ID NO: 1252 - protein, 48 aa, Bunodosoma caissarum
GVACRCDSDGPTSRGNTLTGTLWLTGGCPSGWHNCRGSGPFIGYCCKK

SEQ ID NO: 1253 - protein, 41 aa, Bunodosoma caissarum
GLPCDCHGHTGTYWLNYYSKCPKGYGYTGRCRYLVGSCCYK

SEQ ID NO: 1254 - protein, 48 aa, Bunodosoma cangicum
GVACRCDSDGPTVRGNSLSGTLWLTGGCPSGWHNCRGSGPFIGYCCKK

SEQ ID NO: 1255 - protein, 35 aa, Stoichactis helianthus
RSCIDTIPKSRCTAFQCKHSMKYRLSFCRKTCGTC

SEQ ID NO: 1256 - protein, 47 aa, Anthopleura xanthogrammica
GVPCLCDSDGPNVRGNTLSGTYWLAGCPSGWHNCKSSGPNIGWCCKK

SEQ ID NO: 1257 - protein, 47 aa, Anthopleura xanthogrammica
GVACLCDADGPSVSGNTLSGILWLAGCPSGWHNCKAHGPTIGWCCKK

SEQ ID NO: 1258 - protein, 47 aa, Anthopleura xanthogrammica
GAACFCDSDGPSVSGNTLSGILWLAGCPSGWHNCKAHGPNIGWCCKK

SEQ ID NO: 1259 - protein, 47 aa, Anthopleura xanthogrammica
GVPCLCDSDGPSVRGNSLSGIIWLFGCPSGWHNCRDHGPTIGWCCKK

SEQ ID NO: 1260 - protein, 49 aa, Anthopleura xanthogrammica
GVSCLCDSDGPSVRGNTLSGILWFYPSGCPSGWHNCKAHGPTIGWCCKQ

SEQ ID NO: 1261 - protein, 48 aa, Bunodosoma cangicum
GVACRCDSDGPTVRGDSLSGTLWLTGGCPSGWHNCRGSGPFIGYCCKK

SEQ ID NO: 1262 - protein, 48 aa, Bunodosoma cangicum
GVACRCDSDGPTVHGDSLSGTLWLTGGCPSGWHNCRGSGPFIGYCCKK

SEQ ID NO: 1263 - protein, 33 aa, Pandinus imperator
GDCLPHLKRCKADNDCCGKKCKRRGTNAEKRCR

SEQ ID NO: 1264 - protein, 32 aa, Centruroides noxius
VACVYRTCDKDCTSRKYRSGKCINNACKCYPY

SEQ ID NO: 1265 - protein, 37 aa, Parabuthus villosus
DEEPKESCSDEMCVIYCKGEEYSTGVCDGPQKCKCSD

SEQ ID NO: 1266 - protein, 37 aa, Parabuthus villosus
DEEPKETCSDEMCVIYCKGEEYSTGVCDGPQKCKCSD

SEQ ID NO: 1267 - protein, 36 aa, Parabuthus granulatus
DEEPKETCSDDMCVIYCKGEEFSTGACDGPQKCKCS

SEQ ID NO: 1268 - protein, 40 aa, Tityus serrulatus
WCSTCLDLACGASRECYDPCFKAFGRAHGKCMNNKCRCYT

SEQ ID NO: 1269 - protein, 40 aa, Tityus trivittatus; identical to SEQ ID NO: 1268

SEQ ID NO: 1270 - protein, 40 aa, Tityus costatus
WCSTCLDLECGASRECYDPCFKAFGRAHGKCMNNKCRCYT

SEQ ID NO: 1271 - protein, 37 aa, Androctonus australis
QNETNKKCQGGSCASVCRRVIGVAAGKCINGRCVCYP

SEQ ID NO: 1272 - protein, 37 aa, Androctonus mauretanicus mauretanicus
QIETNKKCQGGSCASVCRKVIGVAAGKCINGRCVCYP

SEQ ID NO: 1273 - protein, 38 aa, Tityus discrepans
QIDTNVKCSGSSKCVKICIDRYNTRGAKCINGRCTCYP

SEQ ID NO: 1274 - protein, 36 aa, Mesobuthus tamulus
DLIDVKCISSQECWIACKKVTGRFEGKCQNRQCRCY

SEQ ID NO: 1275 - protein, 31 aa, Mesobuthus martensii
AACYSSDCRVKCVAMGFSSGKCINSKCKCYK

SEQ ID NO: 1276 - protein, 37 aa, Mesobuthus tamulus
QFTDVDCSVSKECWSVCKDLFGVDRGKCMGKKCRCYQ

SEQ ID NO: 1277 - protein, 37 aa, Centruroides limbatus
  MISC_FEATURE (37)..(37): Xaa is Ala, Arg, Asn, Asp, Asx, Cys, Glu, Gln, Glx, Gly, His, Ile, Leu, Lys, Met, Phe, Pro, Ser, Thr, Trp, Tyr, or Val.
VFIDVSCSVSKECWAPCKAAVGTDRGKCMGKKCRCYX

SEQ ID NO: 1278 - protein, 36 aa, Leiurus quinquestriatus hebraeus
GLIDVRCYDSRQCWIACKKVTGSTQGKCQNKQCRCY

SEQ ID NO: 1279 - protein, 36 aa, Centruroides limbatus
HFIDVKCTTSKECWPPCKAATGKAAGKCMNKKCKCQ

SEQ ID NO: 1280 - protein, 37 aa, Parabuthus transvaalicus
EVDMRCKSSKECLVKCKQATGRPNGKCMNRKCKCYPR

SEQ ID NO: 1281 - protein, 37 aa, Centruroides noxius
TFIDVDCTVSKECWAPCKAAFGVDRGKCMGKKCKCYV

SEQ ID NO: 1282 - protein, 37 aa, Leiurus quinquestriatus hebraeus
QFTNVSCTTSKECWSVCEKLYNTSRGKCMNKKCRCYS

SEQ ID NO: 1283 - protein, 39 aa, Centruroides noxius
TIINVKCTSPKQCSKPCKELYGSSAGAKCMNGKCKCYNN

SEQ ID NO: 1284 - protein, 39 aa, Centruroides margaritatus
TIINVKCTSPKQCLPPCKAQFGQSAGAKCMNGKCKCYPH

SEQ ID NO: 1285 - protein, 38 aa, Centruroides limpidus limpidus
ITINVKCTSPQQCLRPCKDRFGQHAGGKCINGKCKCYP

SEQ ID NO: 1286 - protein, 38 aa, Centruroides noxius
TIINEKCFATSQCWTPCKKAIGSLQSKCMNGKCKCYNG

SEQ ID NO: 1287 - protein, 39 aa, Centruroides limbatus
TVIDVKCTSPKQCLPPCKAQFGIRAGAKCMNGKCKCYPH

SEQ ID NO: 1288 - protein, 34 aa, Centruroides limbatus
  MISC_FEATURE (23)..(23): Xaa is Ala, Arg, Asn, Asp, Asx, Cys, Glu, Gln, Glx, Gly, His, Ile, Leu, Lys, Met, Phe, Pro, Ser, Thr, Trp, Tyr, or Val.
TFINVKCTSPKQCLPACKEKFGXAAGKCMNGKCK

SEQ ID NO: 1289 - protein, 36 aa, Centruroides limpidus limpidus
TVIDVKCTSPKQCLPPCKEIYGRHAGAKCMNGKCKC

SEQ ID NO: 1290 - protein, 39 aa, Centruroides elegans
TVINVKCTSPKQCLKPCKDLYGPHAGAKCMNGKCKCYNN

SEQ ID NO: 1291 - protein, 39 aa, Centruroides elegans
TIINVKCTSPKQCLKPCKDLYGPHAGAKCMNGKCKCYNN

SEQ ID NO: 1292 - protein, 39 aa, Centruroides elegans
TIINVKCTSPKQCLLPCKEIYGIHAGAKCMNGKCKCYKI

SEQ ID NO: 1293 - protein, 39 aa, Centruroides elegans
TIINVKCTSPKQCLPPCKEIYGRHAGAKCMNGKCHCSKI

SEQ ID NO: 1294 - protein, 39 aa, Centruroides elegans; identical to SEQ ID NO: 1293

SEQ ID NO: 1295 - protein, 38 aa, Androctonus mauretanicus mauretanicus
GVEINVKCSGSPQCLKPCKDAGMRFGKCMNRKCHCTPK

SEQ ID NO: 1296 - protein, 38 aa, Leiurus quinquestriatus hebraeus
GVPINVSCTGSPQCIKPCKDAGMRFGKCMNRKCHCTPK

SEQ ID NO: 1297 - protein, 38 aa, Leiurus quinquestriatus hebraeus
GVPINVPCTGSPQCIKPCKDAGMRFGKCMNRKCHCTPK

SEQ ID NO: 1298 - protein, 38 aa, Leiurus quinquestriatus hebraeus
GVPINVKCTGSPQCLKPCKDAGMRFGKCINGKCHCTPK

SEQ ID NO: 1299 - protein, 38 aa, Orthochirus scrobiculosus
GVIINVKCKISRQCLEPCKKAGMRFGKCMNGKCHCTPK

SEQ ID NO: 1300 - protein, 38 aa, Buthus sindicus
GVPINVKCRGSPQCIQPCRDAGMRFGKCMNGKCHCTPQ

SEQ ID NO: 1301 - protein, 37 aa, Buthus occitanus tunetanus
VGIPVSCKHSGQCIKPCKDAGMRFGKCMNRKCDCTPK

SEQ ID NO: 1302 - protein, 37 aa, Tityus serrulatus
VFINAKCRGSPECLPKCKEAIGKAAGKCMNGKCKCYP

SEQ ID NO: 1303 - protein, 37 aa, Tityus discrepans
VFINVKCTGSKQCLPACKAAVGKAAGKCMNGKCKCYT

SEQ ID NO: 1304 - protein, 37 aa, Tityus cambridgei
VFINVKCRGSKECLPACKAAVGKAAGKCMNGKCKCYP

SEQ ID NO: 1305 - protein, 31 aa, Leiurus quinquestriatus hebraeus
AFCNLRMCQLSCRSLGLLGKCIGDKCECVKH

SEQ ID NO: 1306 - protein, 31 aa, Androctonus mauretanicus mauretanicus
TVCNLRRCQLSCRSLGLLGKCIGVKCECVKH

SEQ ID NO: 1307 - protein, 31 aa, Mesobuthus tamulus
AFCNLRRCELSCRSLGLLGKCIGEECKCVPY

SEQ ID NO: 1308 - protein, 31 aa, Mesobuthus tamulus
AFCNLRRCELSCRSLGLLGKCIGEECKCVPH

SEQ ID NO: 1309 - protein, 35 aa, Pandinus imperator
LVKCRGTSDCGRPCQQQTGCPNSKCINRMCKCYGC

SEQ ID NO: 1310 - protein, 34 aa, Scorpio maurus palmatus
VSCTGSKDCYAPCRKQTGCPNAKCINKSCKCYGC

SEQ ID NO: 1311 - protein, 34 aa, Heterometrus spinifer
ASCRTPKDCADPCRKETGCPYGKCMNRKCKCNRC

SEQ ID NO: 1312 - protein, 35 aa, Anuroctonus phaiodactylus
QKECTGPQHCTNFCRKNKCTHGKCMNRKCKCFNCK

SEQ ID NO: 1313 - protein, 34 aa, Heterometrus spinifer
IRCSGSRDCYSPCMKQTGCPNAKCINKSCKCYGC

SEQ ID NO: 1314 - protein, 36 aa, Hadrurus gertschi
TGTSCISPKQCTEPCRAKGCKHGKCMNRKCHCMLCL

SEQ ID NO: 1315 - protein, 35 aa, Pandinus imperator
TISCTNEKQCYPHCKKETGYPNAKCMNRKCKCFGR

SEQ ID NO: 1316 - protein, 42 aa, Centruroides elegans
DRDSCVDKSRCAKYGYYQECTDCCKKYGHNGGTCMFFKCKCA

SEQ ID NO: 1317 - protein, 42 aa, Centruroides gracilis
DRDSCVDKSRCAKYGHYQECTDCCKKYGHNGGTCMFFKCKCA

SEQ ID NO: 1318 - protein, 42 aa, Centruroides sculpturatus
DRDSCVDKSRCAKYGYYQECQDCCKKAGHNGGTCMFFKCKCA

SEQ ID NO: 1319 - protein, 42 aa, Centruroides limpidus limpidus
DRDSCVDKSRCSKYGYYQECQDCCKKAGHNGGTCMFFKCKCA

SEQ ID NO: 1320 - protein, 42 aa, Centruroides exilicauda
DRDSCVDKSRCAKYGYYQECQDCCKKAGHSGGTCMFFKCKCA

SEQ ID NO: 1321 - protein, 43 aa, Centruroides noxius
DRDSCVDKSKCGKYGYYQECQDCCKNAGHNGGTCVYYKCKCNP

SEQ ID NO: 1322 - protein, 36 aa, Buthus eupeus
MCMPCFTTRPDMAQQCRACCKGRGKCFGPQCLCGYD

SEQ ID NO: 1323 - protein, 35 aa, Buthus sindicus
RCKPCFTTDPQMSKKCADCCGGKGKGKCYGPQCLC

SEQ ID NO: 1324 - protein, 36 aa, Buthus eupeus
MCMPCFTTDHQTARRCRDCCGGRGRKCFGQCLCGYD

SEQ ID NO: 1325 - protein, 35 aa, Buthus eupeus
MCMPCFTTDHNMAKKCRDCCGGNGKCFGPQCLCNR

SEQ ID NO: 1326 - protein, 35 aa, Buthus eupeus
MCMPCFTTDPNMAKKCRDCCGGNGKCFGPQCLCNR

SEQ ID NO: 1327 - protein, 36 aa, Buthus occitanus tunetanus
  MISC_FEATURE (32)..(32): Xaa is Ala, Arg, Asn, Asp, Asx, Cys, Glu, Gln, Glx, Gly, His, Ile, Leu, Lys, Met, Phe, Pro, Ser, Thr, Trp, Tyr, or Val.
  MISC_FEATURE (33)..(33): Xaa is Ala, Arg, Asn, Asp, Asx, Cys, Glu, Gln, Glx, Gly, His, Ile, Leu, Lys, Met, Phe, Pro, Ser, Thr, Trp, Tyr, or Val.
VRDAYIAQNYNCVYTCFKNDYCNDICTKNGAXXGYC

SEQ ID NO: 1328 - protein, 38 aa, Leiurus quinquestriatus hebraeus
RCSPCFTTDQQMTKKCYDCCGGKGKGKCYGPQCICAPY

SEQ ID NO: 1329 - protein, 33 aa, Buthus occitanus tunetanus
AEIKVRDGYIVYPNNCVYHCGLDPYCNDLCTGA

SEQ ID NO: 1330 - protein, 33 aa, Scorpio maurus palmatus; identical to SEQ ID NO: 722

SEQ ID NO: 1331 - protein, 36 aa, Buthus sindicus
CGPCFTKDPETEKKCATCCGGIGRCFGPQCLCNRGY

SEQ ID NO: 1332 - protein, 36 aa, Leiurus quinquestriatus quinquestriatus
MCMPCFTTDHQMARKCDDCCGGKGRGKCYGPQCLCR

SEQ ID NO: 1333 - protein, 35 aa, Androctonus mauretanicus mauretanicus
CGPCFTTDPYTESKCATCCGGRGKCVGPQCLCNRI

SEQ ID NO: 1334 - protein, 35 aa, Buthus eupeus
MCMPCFTTDPNMANKCRDCCGGGKKCFGPQCLCNR

SEQ ID NO: 1335 - protein, 35 aa, Hemiscorpius lepturus
IKCTLSKDCYSPCKKETGCPRAKCINRNCKCYGCS

SEQ ID NO: 1336 - protein, 34 aa, Leiurus quinquestriatus hebraeus
CGPCFTTDHQMEQKCAECCGGIGKCYGPQCLCNR

SEQ ID NO: 1337 - protein, 70 aa, Androctonus australis; identical to SEQ ID NO: 645

SEQ ID NO: 1338 - protein, 72 aa, Anuroctonus phaiodactylus
KFIRHKDESFYECGQLIGYQQYCVNACQAHGSKEKGYCKGMAPFGLPGGCYCPKLPSNRVKMCFGALESKCA

SEQ ID NO: 1339 - protein, 61 aa, Buthacus arenicola; identical to SEQ ID NO: 699

SEQ ID NO: 1340 - protein, 65 aa, Bothus occitanus tunetanus; identical to SEQ ID NO: 676

SEQ ID NO: 1341 - protein, 60 aa, Bothus occitanus tunetanus; identical to SEQ ID NO: 701

SEQ ID NO: 1342 - protein, 64 aa, Buthus martensii; identical to SEQ ID NO: 681

SEQ ID NO: 1343 - protein, 64 aa, Buthus martensii; identical to SEQ ID NO: 682

SEQ ID NO: 1344 - protein, 64 aa, Buthus martensii; identical to SEQ ID NO: 683

SEQ ID NO: 1345 - protein, 66 aa, Buthus martensii; identical to SEQ ID NO: 684

SEQ ID NO: 1346 - protein, 72 aa, Buthus martensii
KKNGYAVDSSGKVAECLFNNYCNNECTKVYYADKGYCCLLKCYCFGLADDKPVLDIWDSTKNYCDVQIIDLS

SEQ ID NO: 1347 - protein, 66 aa, buthus occitanus mardochei; identical to SEQ ID NO: 679

SEQ ID NO: 1348 - protein, 65 aa, buthus occitanus mardochei; identical to SEQ ID NO: 680

SEQ ID NO: 1349 - protein, 64 aa, Hottentotta judaica; identical to SEQ ID NO: 677

SEQ ID NO: 1350 - protein, 76 aa, Hottentotta judaicus
KKNGYPLDRNGKTTECSGVNAIAPHYCNSECTKVYYAESGYCCWGACYCFGLEDDKPIGPMKDITKKYCDVQIIPS

SEQ ID NO: 1351 - protein, 61 aa, Hottentotta judaicus; identical to SEQ ID NO: 649

SEQ ID NO: 1352 - protein, 64 aa, Leiurus quinquestriatus hebraeus; identical to SEQ ID NO: 674

SEQ ID NO: 1353 - protein, 63 aa, Leiurus quinquestriatus hebraeus; identical to SEQ ID NO: 702

SEQ ID NO: 1354 - protein, 61 aa, Leiurus quinquestriatus hebraeus; identical to SEQ ID NO: 696

SEQ ID NO: 1355 - protein, 60 aa, Leiurus quinquestriatus hebraeus; identical to SEQ ID NO: 697

SEQ ID NO: 1356 - protein, 70 aa, Leiurus quinquestriatus hebraeus; identical to SEQ ID NO: 694

SEQ ID NO: 1357 - protein, 67 aa, Leiurus quinquestriatus hebraeus; identical to SEQ ID NO: 678

SEQ ID NO: 1358 - protein, 64 aa, Leiurus quinquestriatus hebraeus; identical to SEQ ID NO: 685

SEQ ID NO: 1359 - protein, 66 aa, Leiurus quinquestriatus hebraeus; identical to SEQ ID NO: 686

SEQ ID NO: 1360 - protein, 70 aa, Leiurus quinquestriatus quinquestriatus; identical to SEQ ID NO: 693

SEQ ID NO: 1361 - protein, 61 aa, Leiurus quinquestriatus quinquestriatus; identical to SEQ ID NO: 648

SEQ ID NO: 1362 - protein, 64 aa, Leiurus quinquestriatus quinquestriatus; identical to SEQ ID NO: 675

SEQ ID NO: 1363 - protein, 65 aa, Odonthobuthus doriae
GVRDAYIADDKNCVYTCASNGYCNTECTKNGAESGYCQWIGRYGNACWCIKLPDEVPIRIPGKCR

SEQ ID NO: 1364 - protein, 61 aa, Tityus serrulatus
KEGYLMDHEGCKLSCFIRPSGYCGRECGIKKGSSGYCAWPACYCYGLPNWVKVWDRATNKC

SEQ ID NO: 1365 - protein, 64 aa, Tityus zulianus; identical to SEQ ID NO: 704

SEQ ID NO: 1366 - protein, 681 aa, Bacillus thuringiensis
MGGIDMNPYQNKNEYEIFNAPSNGFSKSNNYSRYPLANKPNQPLKNTNYKDWLNVCQDNQQYGNNAGNFASSETIVGVSAGIIVVGTMLGAFAAPVLAAGIISFGTLLPIFWQGSDPANVWQDLLNIGGRPIQEIDKNIINVLTSIVTPIKNQLDKYQEFFDKWEPARTHANAKAVHDLFTTLEPIIDKDLDMLKNNASYRIPTLPAYAQIATWHLNLLKHAATYYNIWLQNQGINPSTFNSSNYYQGYLKRKIQEYTDYCIQTYNAGLTMIRTNTNATWNMYNTYRLEMTLTVLDLIAIFPNYDPEKYPIGVKSELIREVYTNVNSDTFRTITELENGLTRNPTLFTWINQGRFYTRNSRDILDPYDIFSFTGNQMAFTHTNDDRNIIWRAVHGNIISQDTSKVFPFYRNKPIDKVEIVRHREYSDIIYEMIFFSNSSEVFRYSSNSTIENNYKRTDSYMIPKQTWKNEEYGHTLSYIKTDNYIFSVVRERRRVAFSWTHTSVDFQNTIDLDNITQIHALKTLKVSSNSKIVKGLGHTSENLVILKDSMNFRVRFLKNVSQQYQVRIRYATNAPKTTVFLTGIDTISVELPSTTSRQNPNATDLTYADFGYVTFSRTVSNKTFEGEDTFINDLYYGTPNHSYNIYIDKIEFIPITQSVLDYTEKQNIEKTQKIVNDLFVN

SEQ ID NO: 1367 - protein, 681 aa, Bacillus thuringiensis; identical to SEQ ID NO: 1366

SEQ ID NO: 1368 - protein, 1176 aa, Bacillus thuringiensis
MDNNPNINECIPYNCLSNPEVEVLGGERIETGYTPIDISLSLTQFLLSEFVPGAGFVLGLVDIIWGIFGPSQWDAFLVQIEQLINQRIEEFARNQAISRLEGLSNLYQIYAESFREWEADPTNPALREEMRIQFNDMNSALTTAIPLFAVQNYQVPLLSVYVQAANLHLSVLRDVSVFGQRWGFDAATINSRYNDLTRLIGNYTDYAVRWYNTGLERVWGPDSRDWVRYNQFRRELTLTVLDIVALFSNYDSRRYPIRTVSQLTREIYTNPVLENFDGSFRGMAQRIEQNIRQPHLMDILNSITIYTDVHRGFNYWSGHQITASPVGFSGPEFAFPLFGNAGNAAPPVLVSLTGLGIFRTLSSPLYRRIILGSGPNNQELFVLDGTEFSFASLTTNLPSTIYRQRGTVDSLDVIPPQDNSVPPRAGFSHRLSHVTMLSQAAGAVYTLRAPTFSWQHRSAEFNNIIPSSQITQIPLTKSTNLGSGTSVVKGPGFTGGDILRRTSPGQISTLRVNITAPLSQRYRVRIRYASTTNLQFHTSIDGRPINQGNFSATMSSGSNLQSGSFRTVGFTTPFNFSNGSSVFTLSAHVFNSGNEVYIDRIEFVPAEVTFEAEYDLERAQKAVNELFTSSNQIGLKTDVTDYHIDQVSNLVECLSDEFCLDEKQELSEKVKHAKRLSDERNLLQDPNFRGINRQLDRGWRGSTDITIQGGDDVFKENYVTLLGTFDECYPTYLYQKIDESKLKAYTRYQLRGYIEDSQDLEIYLIRYNAKHETVNVPGTGSLWPLSAQSPIGKCGEPNRCAPHLEWNPDLDCSCRDGEKCAHHSHHFSLDIDVGCTDLNEDLGVWVIFKIKTQDGHARLGNLEFLEEKPLVGEALARVKRAEKKWRDKREKLEWETNIVYKEAKESVDALFVNSQYDQLQADTNIAMIHAADKRVHSIREAYLPELSVIPGVNAAIFEELEGRIFTAFSLYDARNVIKNGDFNNGLSCWNVKGHVDVEGQNNQRSVLVVPEWEAEVSQEVRVCPGRGYILRVTAYKEGYGEGCVTIHEIENNTDELKFSNCVEEEIYPNNTVTCNDYTVNQEEYGGAYTSRNRGYNEAPSVPADYASVYEEKSYTDGRRENPCEFNRGYRDYTPLPVGYVTKELEYFPETDKVWIEIGETEGTFIVDSVQLLLMEE

SEQ ID NO: 1369 - protein, 1176 aa, Bacillus thuringiensis; identical to SEQ ID NO: 1368

SEQ ID NO: 1370 - protein, 1176 aa, Bacillus thuringiensis
MDNNPNINECIPYNCLSNPEVEVLGGERIETGYTPIDISLSLTQFLLSEFVPGAGFVLGLVDIIWGIFGPSQWDAFLVQIEQLINQRIEEFARNQAISRLEGLSNLYQIYAESFREWEADPTNPALREEMRIQFNDMNSALTTAIPLFAVQNYQVPLLSVYVQAANLHLSVLRDVSVFGQRWGFDAATINSRYNDLTRLIGNYTDYAVRWYNTGLERVWGPDSRDWVRYNQFRRELTLTVLDIVALFSNYDSRRYPIRTVSQLTREIYTNPVLENFDGSFRGMAQRIEQNIRQPHLMDILNSITIYTDVHRGFNYWSGHQITASPVGFSGPEFAFPLFGNAGNAAPPVLVSLTGLGIFRTLSSPLYRRIILGSGPNNQELFVLDGTEFSFASLTTNLPSTIYRQRGTVDSLDVIPPQDNSVPPRAGFSHRLSHVTMLSQAAGAVYTLRAPTFSWQHRSAEFNNIIPSSQITQIPLTKSTNLGSGTSVVKGPGFTGGDILRRTSPGQISTLRVNITAPLSQRYRVRIRYASTTNLQFHTSIDGRPINQGNFSATMSSGSNLQSGSFRTVGFTTPFNFSNGSSVFTLSAHVFNSGNEVYIDRIEFVPAEVTFEAEYDLERAQKAVNELFTSSNQIGLKTDVTDYHIDQVSNLVECLSDEFCLDEKQELSEKVKHAKRLSEERNLLQDPNFRGINRQLDRGWRGSTDITIQGGDDVFKENYVTLLGTFDECYPTYLYQKIDESKLKAYTRYQLRGYIEDSQDLEIYLIRYNAKHETVNVPGTGSLWPLSAQSPIGKCGEPNRCAPHLEWNPDLDCSCRDGEKCAHHSHHFSLDIDVGCTDLNEDLGVWVIFKIKTQDGHARLGNLEFLEEKPLVGEALARVKRAEKKWRDKREKLEWETNIVYKEAKESVDALFVNSQYDQLQADTNIAMIHAADKRVHSIREAYLPELSVIPGVNAAIFEELEGRIFTAFSLYDARNVIKNGDFNNGLSCWNVKGHVDVEEQNNQRSVLVLPEWEAEVSQEVRVCPGRGYILRVTAYKEGYGEGCVTIHEIENNTDELKFSNCVEEEIYPNNTVTCNDYTVNQEEYGGAYTSRNRGYNEAPSVPADYASVYEEKSYTDGRRENPCEFNRGYRDYTPLPVGYVTKELEYFPETDKVWIEIGETEGTFIVDSVELLLMEE

SEQ ID NO: 1371 - protein, 3826 aa, Bacillus thuringiensis
CCTGGGTCAAAAATTGATATTTAGTAAAATTAGTTGCACTTTGTGCATTTTTTCATAAGATGAGTCATATGTTTTAAATTGTAGTAATGAAAAACAGTATTATATCATAATGAATTGGTATCTTAATAAAAGAGATGGAGGTAACTTATGGATAACAATCCGAACATCAATGAATGCATTCCTTATAATTGTTTAAGTAACCCTGAAGTAGAAGTATTAGGTGGAGAAAGAATAGAAACTGGTTACACCCCAATCGATATTTCCTTGTCGCTAACGCAATTTCTTTTGAGTGAATTTGTTCCCGGTGCTGGATTTGTGTTAGGACTAGTTGATATAATATGGGGAATTTTTGGTCCCTCTCAATGGGACGCATTTCTTGTACAAATTGAACAGTTAATTAACCAAAGAATAGAAGAATTCGCTAGGAACCAAGCCATTTCTAGATTAGAAGGACTAAGCAATCTTTATCAAATTTACGCAGAATCTTTTAGAGAGTGGGAAGCAGATCCTACTAATCCAGCATTAAGAGAAGAGATGCGTATTCAATTCAATGACATGAACAGTGCCCTTACAACCGCTATTCCTCTTTTGGCAGTTCAAAATTATCAAGTTCCTCTTTTATCAGTATATGTTCAAGCTGCAAATTTACATTTATCAGTTTTGAGAGATGTTTCAGTGTTTGGACAAAGGTGGGGATTTGATGCCGCGACTATCAATAGTCGTTATAATGATTTAACTAGGCTTATTGGCAACTATACAGATTATGCTGTGCGCTGGTACAATACGGGATTAGAGCGTGTATGGGGACCGGATTCTAGAGATTGGGTAAGGTATAATCAATTTAGAAGAGAGCTAACACTTACTGTATTAGATATCGTTGCTCTATTCTCAAATTATGATAGTCGAAGGTATCCAATTCGAACAGTTTCCCAATTAACAAGAGAAATTTATACGAACCCAGTATTAGAAAATTTTGATGGTAGTTTTCGTGGAATGGCTCAGAGAATAGAACAGAATATTAGGCAACCACATCTTATGGATATCCTTAATAGTATAACCATTTATACTGATGTGCATAGAGGCTTTAATTATTGGTCAGGGCATCAAATAACAGCTTCTCCTGTAGGGTTTTCAGGACCAGAATTCGCATTCCCTTTATTTGGGAATGCGGGGAATGCAGCTCCACCCGTACTTGTCTCATTAACTGGTTTGGGGATTTTTAGAACATTATCTTCACCTTTATATAGAAGAATTATACTTGGTTCAGGCCCAAATAATCAGGAACTGTTTGTCCTTGATGGAACGGAGTTTTCTTTTGCCTCCCTAACGACCAACTTGCCTTCCACTATATATAGACAAAGGGGTACAGTCGATTCACTAGATGTAATACCGCCACAGGATAATAGTGTACCACCTCGTGCGGGATTTAGCCATCGATTGAGTCATGTTACAATGCTGAGCCAAGCAGCTGGAGCAGTTTACACCTTGAGAGCTCCAACGTTTTCTTGGCAGCATCGCAGTGCTGAATTTAATAATATAATTCCTTCATCACAAATTACACAAATACCTTTAACAAAATCTACTAATCTTGGCTCTGGAACTTCTGTCGTTAAAGGACCAGGATTTACAGGAGGAGATATTCTTCGAAGAACTTCACCTGGCCAGATTTCAACCTTAAGAGTAAATATTACTGCACCATTATCACAAAGATATCGGGTAAGAATTCGCTACGCTTCTACTACAAATTTACAATTCCATACATCAATTGACGGAAGACCTATTAATCAGGGTAATTTTTCAGCAACTATGAGTAGTGGGAGTAATTTACAGTCCGGAAGCTTTAGGACTGTAGGTTTTACTACTCCGTTTAACTTTTCAAATGGATCAAGTGTATTTACGTTAAGTGCTCATGTCTTCAATTCAGGCAATGAAGTTTATATAGATCGAATTGAATTTGTTCCGGCAGAAGTAACCTTTGAGGCAGAATATGATTTAGAAAGAGCACAAAAGGCGGTGAATGAGCTGTTTACTTCTTCCAATCAAATCGGGTTAAAAACAGATGTGACGGATTATCATATTGATCAAGTATCCAATTTAGTTGAGTGTTTATCAGATGAATTTTGTCTGGATGAAAAACAAGAATTGTCCGAGAAAGTCAAACATGCGAAGCGACTTAGTGATGAGCGGAATTTACTTCAAGATCCAAACTTCAGAGGGATCAATAGACAACTAGACCGTGGCTGGAGAGGAAGTACGGATATTACCATCCAAGGAGGCGATGACGTATTCAAAGAGAATTACGTTACGCTATTGGGTACCTTTGATGAGTGCTATCCAACGTATTTATATCAAAAAATAGATGAGTCGAAATTAAAAGCCTATACCCGTTATCAATTAAGAGGGTATATCGAAGATAGTCAAGACTTAGAAATCTATTTAATTCGCTACAATGCAAAACATGAAACAGTAAATGTGCCAGGTACGGGTTCCTTATGGCCGCTTTCAGCCCAAAGTCCAATCGGAAAGTGTGGAGAGCCGAATCGATGCGCGCCACACCTTGAATGGAATCCTGACTTAGATTGTTCGTGTAGGGATGGAGAAAAGTGTGCCCATCATTCGCATCATTTCTCCTTAGACATTGATGTAGGATGTACAGACTTAAATGAGGACCTAGGTGTATGGGTGATCTTTAAGATTAAGACGCAAGATGGGCACGCAAGACTAGGGAATCTAGAGTTTCTCGAAGAGAAACCATTAGTAGGAGAAGCGCTAGCTCGTGTGAAAAGAGCGGAGAAAAAATGGAGAGACAAACGTGAAAAATTGGAATGGGAAACAAATATCGTTTATAAAGAGGCAAAAGAATCTGTAGATGCTTTATTTGTAAACTCTCAATATGATCAATTACAAGCGGATACGAATATTGCCATGATTCATGCGGCAGATAAACGTGTTCATAGCATTCGAGAAGCTTATCTGCCTGAGCTGTCTGTGATTCCGGGTGTCAATGCGGCTATTTTTGAAGAATTAGAAGGGCGTATTTTCACTGCATTCTCCCTATATGATGCGAGAAATGTCATTAAAAATGGTGATTTTAATAATGGCTTATCCTGCTGGAACGTGAAAGGGCATGTAGATGTAGAAGAACAAAACAACCAACGTTCGGTCCTTGTTGTTCCGGAATGGGAAGCAGAAGTGTCACAAGAAGTTCGTGTCTGTCCGGGTCGTGGCTATATCCTTCGTGTCACAGCGTACAAGGAGGGATATGGAGAAGGTTGCGTAACCATTCATGAGATCGAGAACAATACAGACGAACTGAAGTTTAGCAACTGCGTAGAAGAGGAAATCTATCCAAATAACACGGTAACGTGTAATGATTATACTGTAAATCAAGAAGAATACGGAGGTGCGTACACTTCTCGTAATCGAGGATATAACGAAGCTCCTTCCGTACCAGCTGATTATGCGTCAGTCTATGAAGAAAAATCGTATACAGATGGACGAAGAGAGAATCCTTGTGAATTTAACAGAGGGTATAGGGATTACACGCCACTACCAGTTGGTTATGTGACAAAAGAATTAGAATACTTCCCAGAAACCGATAAGGTATGGATTGAGATTGGAGAAACGGAAGGAACATTTATCGTGGACAGCGTGGAATTACTCCTTATGGAGGAATAGTCTCATGCAAACTCAGGTTTAAATATCGTTTTCAAATCAATTGTCCAAGAGCAGCATTACAAATAGATAAGTAATTTGTTGTAATGAAAAACGGACATCACCTCCATTGAAACGGAGTGATGTCCGTTTTACTATGTTATTTTCTAGT

SEQ ID NO: 1372 - protein, 1156 aa, Bacillus thuringiensis
MDNNPNINECIPYNCLSNPEVEVLGGERIETGYTPIDISLSLTQFLLSEFVPGAGFVLGLVDIIWGIFGPSQWDAFLVQIEQLINQRIEEFARNQAISRLEGLSNLYQIYAESFREWEADPTNPALREEMRIQFNDMNSALTTAIPLFAVQNYQVPLLSVYVQAANLHLSVLRDVSVFGQRWGFDAATINSRYNDLTRLIGNYTDHAVRWYNTGLERVWGPDSRDWIRYNQFRRELTLTVLDIVSLFPNYDSRTYPIRTVSQLTREIYTNPVLENFDGSFRGSAQGIEGSIRSPHLMDILNSITIYTDAHRGEYYWSGHQIMASPVGFSGPEFTFPLYGTMGNAAPQQRIVAQLGQGVYRTLSSTLYRRPFNIGINNQQLSVLDGTEFAYGTSSNLPSAVYRKSGTVDSLDEIPPQNNNVPPRQGFSHRLSHVSMFRSGFSNSSVSIIRAPMFSWIHRSAEFNNIIPSSQITQIPLTKSTNLGSGTSVVKGPGFTGGDILRRTSPGQISTLRVNITAPLSQRYRVRIRYASTTNLQFHTSIDGRPINQGNFSATMSSGSNLQSGSFRTVGFTTPFNFSNGSSVFTLSAHVFNSGNEVYIDRIEFVPAEVTFEAEYDLERAQKAVNELFTSSNQIGLKTDVTDYHIDQVSNLVECLSDEFCLDEKKELSEKVKHAKRLSDERNLLQDPNFRGINRQLDRGWRGSTDITIQGGDDVFKENYVTLLGTFDECYPTYLYQKIDESKLKAYTRYQLRGYIEDSQDLEIYLIRYNAKHETVNVPGTGSLWPLSAPSPIGKCAHHSHHFSLDIDVGCTDLNEDLGVWVIFKIKTQDGHERLGNLEFLEGRAPLVGEALARVKRAEKKWRDKREKLEWETNIVYKEAKESVDALFVNSQYDRLQADTNIAMIHAADKRVHSIREAYLPELSVIPGVNAAIFEELEGRIFTAFSLYDARNVIKNGDFNNGLSCWNVKGHVDVEEQNNHRSVLVVPEWEAEVSQEVRVCPGRGYILRVTAYKEGYGEGCVTIHEIENNTDELKFSNCVEEEVYPNNTVTCNDYTATQEEYEGTYTSRNRGYDGAYESNSSVPADYASAYEEKAYTDGRRDNPCESNRGYGDYTPLPAGYVTKELEYFPETDKVWIEIGETEGTFIVDSVELLLMEE

SEQ ID NO: 1373 - protein, 2815 aa, Bacillus thuringiensis
AAATTGTAGTAATGAAAAACAGTATTATATCATAATGAATTGGTATCTTAATAAAAGAGATGGAGGTAACTTATGGATAACAATCCGAACATCAATGAATGCATTCCTTATAATTGTTTAAGTAACCCTGAAGTAGAAGTATTAGGTGGAGAAAGAATAGAAACTGGTTACACCCCAATCGATATTTCCTTGTCGCTAACGCAATTTCTTTTGAGTGAATTTGTTCCCGGTGCTGGATTTGTGTTAGGACTAGTTGATATAATATGGGGAATTTTTGGTCCCTCTCAATGGGACGCATTTCTTGTACAAATTGAACAGTTAATTAACCAAAGAATAGAAGAATTCGCTAGGAACCAAGCCATTTCTAGATTAGAAGGACTAAGCAATCTTTATCAAATTTACGCAGAATCTTTTAGAGAGTGGGAAGCAGATCCTACTAATCCAGCATTAAGAGAAGAGATGCGTATTCAATTCAATGACATGAACAGTGCCCTTACAACCGCTATTCCTCTTTTTGCAGTTCAAAATTATCAAGTTCCTCTTTTATCAGTATATGTTCAAGCTGCAAATTTACATTTATCAGTTTTGAGAGATGTTTCAGTGTTTGGACAAAGGTGGGGATTTGATGCCGCGACTATCAATAGTCGTTATAATGATTTAACTAGGCTTATTGGCAACTATACAGATCATGCTGTACGCTGGTACAATACGGGATTAGAGCGTGTATGGGGACCGGATTCTAGAGATTGGATAAGATATAATCAATTTAGAAGAGAATTAACACTAACTGTATTAGATATCGTTTCTCTATTTCCGAACTATGATAGTAGAACGTATCCAATTCGAACAGTTTCCCAATTAACAAGAGAAATTTATACAAACCCAGTATTAGAAAATTTTGATGGTAGTTTTCGAGGCTCGGCTCAGGGCATAGAAGGAAGTATTAGGAGTCCACATTTGATGGATATACTTAACAGTATAACCATCTATACGGATGCTCATAGAGGAGAATATTATTGGTCAGGGCATCAAATAATGGCTTCTCCTGTAGGGTTTTCGGGGCCAGAATTCACTTTTCCGCTATATGGAACTATGGGAAATGCAGCTCCACAACAACGTATTGTTGCTCAACTAGGTCAGGGCGTGTATAGAACATTATCGTCCACTTTATATAGAAGACCTTTTAATATAGGGATAAATAATCAACAACTATCTGTTCTTGACGGGACAGAATTTGCTTATGGAACCTCCTCAAATTTGCCATCCGCTGTATACAGAAAAAGCGGAACGGTAGATTCGCTGGATGAAATACCGCCACAGAATAACAACGTGCCACCTAGGCAAGGATTTAGTCATCGATTAAGCCATGTTTCAATGTTTCGTTCAGGCTTTAGTAATAGTAGTGTAAGTATAATAAGAGCTCCTATGTTCTCTTGGATACATCGTAGTGCTGAATTTAATAATATAATTCCTTCATCACAAATTACACAAATACCTTTAACAAAATCTACTAATCTTGGCTCTGGAACTTCTGTCGTTAAAGGACCAGGATTTACAGGAGGAGATATTCTTCGAAGAACTTCACCTGGCCAGATTTCAACCTTAAGAGTAAATATTACTGCACCATTATCACAAAGATATCGGGTAAGAATTCGCTACGCTTCTACCACAAATTTACAATTCCATACATCAATTGACGGAAGACCTATTAATCAGGGGAATTTTTCAGCAACTATGAGTAGTGGGAGTAATTTACAGTCCGGAAGCTTTAGGACTGTAGGTTTTACTACTCCGTTTAACTTTTCAAATGGATCAAGTGTATTTACGTTAAGTGCTCATGTCTTCAATTCAGGCAATGAAGTTTATATAGATCGAATTGAATTTGTTCCGGCAGAAGTAACCTTTGAGGCAGAATATGATTTAGAAAGAGCACAAAAGGCGGTGAATGAGCTGTTTACTTCTTCCAATCAAATCGGGTTAAAAACAGATGTGACGGATTATCATATTGATCAAGTATCCAATTTAGTTGAGTGTTTATCTGATGAATTTTGTCTGGATGAAAAAAAAGAATTGTCCGAGAAAGTCAAACATGCGAACGACTTAGTGATGAGCGGAATTTACTTCAAGATCCAAACTTTAGAGGGATCAATAGACAACTAGACCGTGGCTGGAGAGGAAGTACGGATATTACCATCCAAGGAGGCGATGACGTATTCAAAGAGAATTACGTTACGCTATTGGGTACCTTTGATGAGTGCTATCCAACGTATTTATATCAAAAAATAGATGAGTCGAAATTAAAAGCCTATACCCGTTACCAATTAAGAGGGTATATCGAAGATAGTCAAGACTTAGAAATCTATTTAATTCGCTACAATGCCAAACACGAAACAGTAAATGTGCCAGGTACGGGTTCCTTATGGCCGCTTTCAGCCCCAAGTCCAATCGGAAAATGTGCCCATCATTCCCATCATTTCTCCTTGGACATTGATGTTGGATGTACAGACTTAAATGAGGACTTAGGTGTATGGGTGATATTCAAGATTAAGACGCAAGATGGCCATGCAAGACTAGGAAATCTAGAATTTCTCGAAGAGAAACCATTAGTAGGAGAAGCACTAGCTCGTGTGAAAAGAGCGGAGAAAAAATGGAGAGACAAACGTGAAAAATTGGAATGGGAAACAAATATTGTTTATAAAGAGGCAAAAGAATCTGTAGATGCTTTATTTGTAAACTCTCAATATGATAGATTACAAGCGGATACCAACATCGCGATGATTCATGCGGCAGATAAACGCGTTCATAGCATTCGAGA

SEQ ID NO: 1374 - protein, 1181 aa, Bacillus thuringiensis
MDNNPNINECIPYNCLSNPEVEVLGGERIETGYTPIDISLSLTQFLLSEFVPGAGFVLGLVDIIWGIFGPSQWDAFLVQIEQLINQRIEEFARNQAISRLEGLSNLYQIYAESFREWEADPTNPALREEMRIQFNDMNSALTTAIPLFAVQNYQVPLLSVYVQAANLHLSVLRDVSVFGQRWGFDAATINSRYNDLTRLIGNYTDHAVRWYNTGLERVWGPDSRDWIRYNQFRRELTLTVLDIVSLFPNYDSRTYPIRTVSQLTREIYTNPVLENFDGSFRGSAQGIEGSIRSPHLMDILNSITIYTDAHRGEYYWSGHQIMASPVGFSGPEFTFPLYGTMGNAAPQQRIVAQLGQGVYRTLSSTLYRRPFNIGINNQQLSVLDGTEFAYGTSSNLPSAVYKKSGTVDSLDEIPPQNNNVPPRQGFSHRLSHVSMFRSGFSNSSVSIIRAPMFSWIHRSAEFNNIIPSSQITQIPLTKSTNLGSGTSVVKGPGFTGGDILRRTSPGQISTLRVNITAPLSQRYRVGIRYASTTNLQFHTSIDGRPINQGNFSATMSSGSNLQSGSFRTVGFTTPFNFSNGSSVFTLSAHVFNSGNEVYIDRIEFVPAEVTFEAEYDLERAQKAVNELFTSSNQIGLKTDVTDYHIDQVSNLVECLSDEFCLDEKQELSEKVKHAKRLSDERNLLQDPNFRGINRQLDRGWRGSTDITIQGGDDVFKENCVTLLGTFDECYPTYLYQKIDESKLKAYTRYQLRGYIEDSQDLEIYLIRYNAKHETVNVPGTGSLWPLSAQSPIGKCGEPNRCAPHLEWNPDLDCSCRDGEKCAHHSHHFSLDIDVGCTDLNEDLGVWVIFKIKTQDGHARLGNLEFLEEKPLVGEALARVKRAEKKWRDKREKLEWETNIVYKEAKESVDALFVNSQYDQLQADTNIAMIHAADKRVHSIREAYLPELSVIPGVNAAIFEELEGRIFTAFSLYDARNVIKNGDFNNGLSCWNVKGHVDVEEQNNQRSVLVVPEWEAEVSQEVRVCPGRGYILRVTAYKEGYGEGCVTIHEIENNTDELKFSNCVEEEVYPNNTVTCNDYTATQEEYEGTYTSRNRGYDGAYESNSSVPADYASAYEEKAYTDGRRDNPCESNRGYGDYTPLPAGYVTKELEYFPETDKVWIEIGETEGTFIVDSVELLLMEE

SEQ ID NO: 1375 - protein, 859 aa, Bacillus thuringiensis
MDILNSITIYTDAHRGEYYWSGHQIMASPVGFSGPEFTFPLYGTMGNAAPQQRIVAQLGQGVYRTLSSTLYRRPFNIGINNQQLSVLDGTEFAYGTSSNLPSAVYRKSGTVDSLDEIPPQNNNVPPRQGFSHRLSHVSMFRSGFSNSSVSIIRAPMFSWIHRSAEFNNIIPSSQITQIPLTKSTNLGSGTSVVKGPGFTGGDILRRTSPGQISTLRVNITAPLSQRYRVRIRYASTTNLQFHTSIDGRPINQGNFSATMSSGSNLQSGSFRTVGFTTPFNFSNGSSVFTLSAHVFNSGNEVYIDRIEFVPAEVTFEAEYDLERAQKAVNELFTSSNQIGLKTDVTDYHIDQVSNLVECLSDEFCLDEKKELSEKVKHAKRLSDERNLLQDPNFRGINRQLDRGWRGSTDITIQGGDDVFKENYVTLLGTFDECYPTYLYQKIDESKLKAYTRYQLRGYIEDSQDLEIYLIRYNAKHETVNVPGTGSLWPLSAPSPIGKCAHHSHHFSLDIDVGCTDLNEDLGVWVIFKIKTQDGHARLGNLEFLEEKPLVGEALARVKRAEKKWRDKREKLEWETNIVYKEAKESVDALFVNSQYDRLQADTNIAMIHAADKRVHSIREAYLPELSVIPGVNAAIFEELEGRIFTAFSLYDARNVIKNGDFNNGLSCWNVKGHVDVEEQNNHRSVLVVPEWEAEVSQEVRVCPGRGYILRVTAYKEGYGEGCVTIHEIENNTDELKFSNCVEEEVYPNNTVTCNDYTATQEEYEGTYTSRNRGYDGAYESNSSVPADYASAYEEKAYTDGRRDNPCESNRGYGDYTPLPAGYVTKELEYFPETDKVWIEIGETEGTFIVDSVELLLMEE

SEQ ID NO: 1376 - protein, 1155 aa, Bacillus thuringiensis; identical to SEQ ID NO: 69

SEQ ID NO: 1377 - protein, 1155 aa, Bacillus thuringiensis
MDNNPNINECIPYNCLSNPEVEVLGGERIETGYTPIDISLSLTQFLLSEFVPGAGFVLGLVDIIWGIFGPSQWDAFLVQIEQLINQRIEEFARNQAISRLEGLSNLYQIYAESFREWEADPTNPALREEMRIQFNDMNSALTTAIPLFAVQNYQVPLLSVYVQAANLHLSVLRDVSVFGQRWGFDAATINSRYNDLTRLIGNYTDHAVRWYNTGLERVWGPDSRDWIRYNQFRRELTLTVLDIVSLFPNYDSRTYPIRTVSQLTREIYTNPVLENFDGSFRGSAQGIEGSIRSPHLMDILNSITIYTDAHRGEYYWSGHRIMASPVGFSGPEFTFPLYGTMGNAAPQQRIVAQLGQGVYRTLSSTLYRRPFNIGINNQQLSVLDGTEFAYGTSSNLPSAVYRKSGTVDSLDEIPPQNNNVPPRQGFSHRLSHVSMFRSGFSNSSVSIIRAPMFSWIHRSAEFNNIIPSSQITQIPLTKSTNLGSGTSVVKGPGFTGGDILRRTSPGQISTLRVNITAPLSQRYRVRIRYASTTNLQFHTSIDGRPINQGNFSATMSSGSNLQSGSFRTVGFTTPFNSSNGSSVFTLSAHVFNSGNEVYIDRIEFVPAEVTFEAEYDLERAQKAVNELFTSSNQIGLKTDVTDYHIDQVSNLVECLSDEFCLDEKKELSEKVKHAKRLSDERNLLQDPNFRGINRQLDRGWRGSTDITIQGGDDVFKENYVTLLGTFDECYPTYLYQKIDESKLKAYTRYQLRGYIEDSQDLEIYLIRYNAKRETVNVPGTGSLWPLSAPSPIGKCAHHSHHFSLDIDVGCTDLNEDLGVWVIFKIKTQDGHARLGNLEFLEEKPLVGEALARVKRAEKKWRDKREKLEWETNIVYKEAKESVDALFVNSQYGRLQADTNIAMIHAADKRVHSIREAYLPELSVIPGVNAAIFEELEGRIFTAFSLYDARNVIKNGDFNNGLSCWNVKGHVDVEEQNNHRSVLVVPEWEAEVSQEVRVCPGRGYILRVTAYKEGYGEGCVTIHEIENNTDELKFSNCVEEEVYPNNTVTCNDYTATQEEYEGTYTSRNRGYDGAYESNSSVPADYASAYEEKAYTDGRRDNPCESNRGYGDYTPLPAGYVTKELEYFPETDKVWIEIGETEGTFIVDSVELLLMEE

SEQ ID NO: 1378 - protein, 1181 aa, Bacillus thuringiensis
MDNNPNINECIPYNCLSNPEVEVLGGERIETGYTPIDISLSLTQFLLSEFVPGAGFVLGLVDIIWGIFGPSQWDAFLVQIEQLINQRIEEFARNQAISRLEGLSNLYQIYAESFREWEADPTNPALREEMRIQFNDMNSALTTAIPLFAVQNYQVPLLSVYVQAANLHLSVLRDVSVFGQRWGFDAATINSRYNDLTRLIGNYTDHAVRWYNTGLERVWGPDSRDWIRYNQFRRELTLTVLDIVSLFPNYDSRTYPIRTVSQLTREIYTNPVLENFDGSFRGSAQGIEGSIRSPHLMDILNSITIYTDAHRGEYYWSGHQIMASPVGFSGPEFTFPLYGTMGNAAPQQRIVAQLGQGVYRTLSSTLYRRPFNIGINNQQLSVLDGTEFAYGTSSNLPSAVYRKSGTVDSLDEIPPQNNNVPPRQGFSHRLSHVSMFRSGLSNSSVSIIRAPMFSWIHRSAEFNNIIPSSQITQIPLTKSTNLGSGTSVVKGPGFTGGDILRRTSPGQISTLRVNITAPLSQRYRVRIRYASTTNLQFHTSIDGRPINQGNFSATMSSGSNLQSGSFRTVGFTTPFNFSNGSSVFTLSAHVFNSGNEVYIDRIEFVPAEVTFEAEYDLERAQKAVNELFTSSNQIGLKTDVTDYHIDQVSNLVECLSDEFCLDEKKELSEKVKHAKRLSDERNLLQDPNFRGINRQLDRGWRGSTDITIQGGDDVFKENYVTLLGTFDECYPTYLYQKIDESKLKAYTRYQLRGYIEDSQDLEIYLIRYNAKHETVNVPGTGSLWPLSAQSPIGKCGEPNRCAPHLEWNPDLDCSCRDGEKCAHHSHHFSLDIDVGCTDLNEDLGVWVIFKIKTQDGHARLGNLEFLEEKPLVGEALARVKRAEKKWRDKREKLEWETNIVYKEAKESVDALFVNSRYDRLQADTNIAMIHAADKRVHSIREAYLPELSVIPGVNAAIFEELEGRIFTAFSLYDARNVIKNGDFNNGLSCWNVKGHVDVEEQNNHRSVLVVPEWEAEVSQEVRVCPGRGYILRVTAYKEGYGEGCVTIHEIENSTDELKFSNCVEEEVYPNNTVTCNDYTATQEEYEGTYTSRNRGYDGAYESNSSVPADYASAYEEKAYTDGRRDNPCESNRGYGDYTPLPAGYVTKELEYFPETDKVWIEIGETEGTFIVDSVDLLLMEE

SEQ ID NO: 1379 - protein, 1155 aa, Bacillus thuringiensis
MDNNPNINECIPYNCLSNPEVEVLGGERIETGYTPIDISLSLTQFLLSEFVPGAGFVLGLVDIIWGIFGPSQWDAFLVQIEQLINQRIEEFARNQAISRLEGLSNLYQIYAESFREWEADPTNPALREEMRIQFNDMNSALTTAIPLFAVQNYQVPLLSVYVQAANLHLSVLRDVSVFGQRWGFDAATINSRYNDLTRLIGNYTDHAVRWYNTGLERVWGPDSRDWIRYNQFRRELTLTVLDIVSLFPNYDSRTYPIRTVSQLTREIYTNPVLENFDGSFRGSAQGIEGSIRSPHLMDILNSITIYTDAHRGEYYWSGHQIMASPVGFSGPEFTFPLYGNMGNAAPQQRIVAQLGQGVYRTLSSTLYRRPFNIGINNQQLSVLDGTEFAYGTSSNLPSAVYRKSGTVDSLDEIPPQNNNVPPRQGFSHRLSHVSMFRSGFSNSSVSIIRAPMFSWIHRSAEFNNIIPSSQITQIPLTKSTNLGSGTSVVKGPGFTGGDILRRTSPGQISTLRVNITAPLSQRYRVRIRYASTTNLQFHTSIDGRPINQGNFSATMSSGSNLQSGSFRTVGFTTPFNFSNGSSVFTLSAHVFNSGNEVYIDRIEFVPAEVTFEAEYDLERAQKAVNELFTSSNQIGLKTDVTDYHIDQVSNLVECLSDEFCLDEKKELSEKVKHAKRLSDERNLLQDPNFRGINRQLDRGWRGSTDITIQGGDDVFKENYVTLLGTFDECYPTYLYQKIDESKLKAYTRYQLRGYIEDSQDLEIYLIRYNAKHETVNVPGTGSLWPLSAPSPIGKCAHHSHHFSLDIDVGCTDLNEDLGVWVIFKIKTQDGHARLGNLEFLEEKPLVGEALARVKRAEKKWRDKREKLEWETNIVYKEAKESVDALFVNSQYDRLQADTNIAMIHAADKRVHSIREAYLPELSVIPGVNAAIFEELEGRIFTAFSLYDARNVIKNGDFNNGLSCWNVKGHVDVEEQNNHRSVLVVPEWEAEVSQEVRVCPGRGYILRVTAYKEGYGEGCVTIHEIENNTDELKFSNCVEEEVYPNNTVTCNDYTATQEEYEGTYTSRNRGYDGAYESNSSVPADYASAYEEKAYTDGRRDNPCESNRGYGDYTPLPAGYVTKELEYFPETDKVWIEIGETEGTFIVDSVELLLMEE

SEQ ID NO: 1380 - protein, 793 aa, Bacillus thuringiensis
MQCVPYNCLSNPEVEVLGGERIETGYTPIDISLSLTQFLLSEFVPGAGFVLGLVDIIWGIFGPSQWDAFLVQIEQLINQRIEEFARNQAISRLEGLSNLYQIYAESFRAWEADPTNPALRVEMRIQFNDMNSALTTAIPLFAVQNYQVPLLSVYVQAANLHLSVLRDVSVFGQRWGFDATTINSRYNDLTRLIGNYTDYAVRWYNTGLERVWGPDSRDWIRYNQFRRELTLTVLDIVSLFPNYDSRTYPIRTVSQLTREIYTNPVLEDFNGSFRGSAQGIEQSIRSPHLMDILNSITIYTDAHRGYYYWSGHQIMASPVGFSGPEFTFPLYGTMGNAAPQQRIVAQLGQGVYRTLSSTFYRSPFNIGINNQQLSVLDGTEFAYGTSSNLPSAVYRKSGTVDSLDEIPPQNNNVPPRQGFSHRLSHVSMFRSGFSNSSVSIIRAPMFSWIHRSAEFNNIIPSSQITQIPLTKSTNLGSGTSVVKGPGFTGGDILRRTSPGQISTLRVNITAPLSQRYRVRIRYASTTNLQFHTSIDGRPINQGNFSATMSSGSNLQSGSFRTAGFTTPFNFSNGSSVFTLSAHVFNSGNEVYIDRIEFVPAEVTFEAEYDLERAQKAVNALFTSSNQIGLKTDVTDYHIDQVSNLVECLSDEFCLDEKQELSEKVKHAKRLSDERNLLQDPNFRWINRQLDRGWRGSTDITIQGGDDVFKENYVTLPGTFDECYPTYLYQKIDESKLKAYTRYQLRGYIEDSQDLEIYLIRYNAKHETVNVPGTGSLWPLSAQSPIGRCGEPNR

SEQ ID NO: 1381 - protein, 373 aa, Bacillus thuringiensis; identical to SEQ ID NO: 93

SEQ ID NO: 1382 - protein, 2990 aa, Bacillus thuringiensis
TATGTTTTAAATTGTAGTAATGAAAAACAGTATTATATCATAATGAATTGGTATCTTAATAAAAGAGATGGAGGTAACTTATGGATAACAATCCGAACATCAATGAATGCATTCCTTATAATTGTTTAAGTAACCCTGAAGTAGAAGTATTAGGTGGAGAAAGAATAGAAACTGGTTACACCCCAATCGATATTTCCTTGTCGCTAACGCAATTTCTTTTGAGTGAATTTGTTCCCGGTGCTGGATTTGTGTTAGGACTAGTTGATATAATATGGGGAATTTTTGGTCCCTCTCAATGGGACGCATTTCTTGTACAAATTGAACAGTTAATTAACCAAAGAATAGAAGAATTCGCTAGGAACCAAGCCATTTCTAGATTAGAAGGACTAAGCAATCTTTATCAAATTTACGCAGAATCTTTTAGAGAGTGGGAAGCAGATCCTACTAATCCAGCATTAAGAGAAGAGATGCGTATTCAATTCAATGACATGAACAGTGCCCTTACAACCGCTATTCCTCTTTTGGCAGTTCAAAATTATCAAGTTCCTCTTTTATCAGTATATGTTCAAGCTGCAAATTTACATTTATCAGTTTTGAGAGATGTTTCAGTGTTTGGACAAAGGTGGGGATTTGATGCCGCGACTATCAATAGTCGTTATAATGATTTAACTAGGCTTATTGGCAACTATACAGATTATGCTGTACGCTGGTACAATACGGGATTAGAACGTGTATGGGGACCGGATTCTAGAGATTGGGTAAGGTATAATCAATTTAGAAGAGAATTAACACTAACTGTATTAGATATCGTTGCTCTGTTCCCGAATTATGATAGTAGAAGATATCCAATTCGAACAGTTTCCCAATTAACAAGAGAAATTTATACAAACCCAGTATTAGAAAATTTTGATGGTAGTTTTCGAGGCTCGGCTCAGGGCATAGAAAGAAGTATTAGGAGTCCACATTTGATGGATATACTTAACAGTATAACCATCTATACGGATGCTCATAGGGGTTATTATTATTGGTCAGGGCATCAAATAATGGCTTCTCCTGTCGGGTTTTCGGGGCCAGAATTCACGTTTCCGCTATATGGAACCATGGGAAATGCAGCTCCACAACAACGTATTGTTGCTCAACTAGGTCAGGGCGTGTATAGAACATTATCCTCTACTTTTTATAGAAGACCTTTTAATATAGGGATAAATAATCAACAACTATCTGTTCTTGACGGGACAGAATTTGCTTATGGAACCTCCTCAAATTTGCCATCCGCTGTATACAGAAAAAGCGGAACGGTAGATTCGCTGGATGAAATACCACCACAGAATAACAACGTGCCACCTAGGCAAGGATTTAGTCATCGATTAAGCCATGTTTCAATGTTTCGTTCAGGCTCTAGTAGTAGTGTAAGTATAATAAGAGCTCCTATGTTCTCTTGGATACATCGTAGTGCTGAATTTAATAATATAATTGCATCGGATAGTATTACTCAAATCCCTGCAGTGAAGGGAAACTTTCTTTTTAATGGTTCTGTAATTTCAGGACCAGGATTTACTGGTGGGGACTTAGTTAGATTAAATAGTAGTGGAAATAACATTCAGAATAGAGGGTATATTGAAGTTCCAATTCACTTCCCATCGACATCTACCAGATATCGAGTTCGTGTACGGTATGCTTCTGTAACCCCGATTCACCTCAACGTTAATTGGGGTAATTCATCCATTTTTTCCAATACAGTACCAGCTACAGCTACGTCATTAGATAATCTACAATCAAGTGATTTTGGTTATTTTGAAAGTGCCAATGCTTTTACATCTTCATTAGGTAATATAGTAGGTGTTAGAAATTTTAGTGGGACTGCAGGAGTGATAATAGACAGATTTGAATTTATTCCAGTTACTGCAACACTCGAGGCTGAATATAATCTGGAAAGAGCGCAGAAGGCGGTGAATGCGCTGTTTACGTCTACAAACCAACTAGGGCTAAAAACAAATGTAACGGATTATCATATTGATCAAGTGTCCAATTTAGTTACGTATTTATCGGATGAATTTTGTCTGGATGAAAAGCGAGAATTGTCCGAGAAAGTCAAACATGCGAAGCGACTCAGTGATGAACGCAATTTACTCCAAGATTCAAATTTCAAAGACATTAATAGGCAACCAGAACGTGGGTGGGGCGGAAGTACAGGGATTACCATCCAAGGAGGGGATGACGTATTTAAAGAAAATTACGTCACACTATCAGGTACCTTTGATGAGTGCTATCCAACATATTTGTATCAAAAAATCGATGAATCAAAATTAAAAGCCTTTACCCGTTATCAATTAAGAGGGTATATCGAAGATAGTCAAGACTTAGAAATCTATTTAATTCGCTACAATGCAAAACATGAAACAGTAAATGTGCCAGGTACGGGTTCCTTATGGCCGCTTTCAGCCCAAAGTCCAATCGGAAAGTGTGGAGAGCCGAATCGATGCGCGCCACACCTTGAATGGAATCCTGACTTAGATTGTTCGTGTAGGGATGGAGAAAAGTGTGCCCATCATTCGCATCATTTCTCCTTAGACATTGATGTAGGATGTACAGACTTAAATGAGGACCTAGGTGTATGGGTGATCTTTAAGATTAAGACGCAAGATGGGCACGCAAGACTAGGGAATCTAGAGTTTCTCGAAGAGAAACCATTAGTAGGAGAAGCGCTAGCTCGTGTGAAAAGAGCGGAGAAAAAATGGAGAGACAAACGTGAAAAATTGGAATGGGAAACAAATATCGTTTATAAAGAGGCAAAAGAATCTGTAGATGCTTTATTTGTAAACTCTCAATATGATCAATTACAAGCGGATACGAATATTGCCATGATTCATGCGGCAGATAAACGTGTTCATAGCATTCGAGAAGCTTGGCGTAATCATGGTCATAGCTGTTTCCTGTGTGAAATTGTTATCCGCTCACAATTCCACACAACATACGAGCCGGAAGCATAA

SEQ ID NO: 1383 - protein, 1177 aa, Bacillus thuringiensis
MDNNPNINECIPYNCLSNPEVEVLGGERIETGYTPIDISLSLTQFLLSEFVPGAGFVLGLVDIIWGIFGPSQWDAFLVQIEQLINQRIEEFARNQAISRLEGLSNLYQIYAESFREWEADPTNPALREEMRIQFNDMNSALTTAIPLLAVQNYQVPLLSVYVQAANLHLSVLRDVSVFGQRWGFDAATINSRYNDLTRLIGNYTDHAVRWYNTGLERVWGPDSRDWVRYNQFRRELTLTVLDIVALFPNYDSRRYPIRTVSQLTREIYTNPVLENFDGSFRGSAQGIERSIRSPHLMDILNSITIYTDAHRGYYYWSGHQIMASPVGFSGPEFTFPLYGTMGNAAPQQRIVAQLGQGVYRTLSSTFYRRSFNIGINNQQLSVLDGTEFAYGTSSNLPSAVYRKSGTVDSLDEIPPQNNNVPPRQGFSHRLSHVSMFRSGSSSSVSIIRAPMFSWIHRSAEFNNIIASDSITQIPAVKGNFLFNGSVISGPGFTGGDLVRLNSSGNNIQNRGYIEVPIHFPSTSTRYRVRVRYASVTPIHLYVNWGNSSIFSNTVPATATSLDNLQSSDFGYFESANAFTSSLGNIVGVRNFSGTAGVIIDRFEFIPVTATLEAEYNLERAQKAVNALFTSTNQLGLKTNVTDYHIDQVSNLVTCLSDEFCLDEKRELSEKVKHAKRLSDERNLLQDSNFKDINRQPERGWGGSTGITIQGGDDVFKENYVTLSGTFDECYPTYLYQKIDESKLKAFTRYQLRGYIEDSQDLEIYLIRYNAKHETVNVSGTGSLWPLSAQSPIGKCGEPNRFAPHLEWNPDLDCSCRDGEKCAHHSHHFSLDIDVGCTDLNEDLGVWVIFKIKTQDGHARLGNLEFLGEKPLVGEALARVKRAEKKWRDKREKLEWETNIVYKEAKESVDALFVNSQYDQLQADTNIAMIHAADKRVHSIREAYLPELSVIPGVNAAIFEELEGRIFTAFSLYDARNVIKNGDFNNGLSCWNVKGHVDVEEQNNHRSVLVVPEWEAEVPQEVRVCPGRGYILRVTAYKEGYGEGCVTIHEIENNTDELKFSNCVEEEVYPNNTVTCNDYTVNQEEYGGAYTSRNRGYNEAPSVPADYASVYEEKSYTDGRRENPCEFNRGYRDYTPLPVGYVTKELEYFPETDKVWIEIGETEGTFIVDSVQLLLMEE

SEQ ID NO: 1384 - protein, 609 aa, Bacillus thuringiensis
MDNNPNINECIPYNCLSNPEVEVLGGERIETGYTPIDISLSLTQFLLSEFVPGAGFVLGLVDIIWGIFGPSQWDAFLVQIEQLINQRIEEFARNQAISRLEGLSNLYQIYAESFREWEADPTNPALREEMRIQFNDMNSALTTAIPLLAVQNYQVPLLSVYVQAANLHLSVLRDVSVFGQRWGFDAATINSRYNDLTRLIGNYTDHAVRWYNTGLERVWGPDSRDWVRYNQFRRELTLTVLDIVALFPNYDSRRYPIRTVSQLTREIYTNPVLENFDGSFRGSAQGIERSIRSPHLMDILNSITIYTDAHRGYYYWSGHQIMASPVGFSGPEFTFPLYGTMGNAAPQQRIVAQLGQGVYRTLSSTFYRRPFNIGINNQQLSVLDGTEFAYGTSSNLPSAIYRKSGTVDSLDEIPPQNNNVPPRQGFSHRLSHVSMFRSGSSSSVSIIRAPMFSWIHRSAEFNNIIASDSITQIPAVKGNFLFNGSVISGPGFTGGDLVRLNSSGNNIQNRGYIEVPIHFPSTSTRYRVRVRYASVTPIHLYVNWGNSSIFSNTVPATATSLDNLQSSDFGYFESANAFTSSLGNIVGVRNFSGTAGVIIDRFEFIPVTA

SEQ ID NO: 1385 - protein, 609 aa, Bacillus thuringiensis
MDNNPNINECIPYNCLSNPEVEVLGGERIETGYTPIDISLSLTQFLLSEFVPGAGFVLGLVDIIWGIFGPSQWDAFLVQIEQLINQRIEEFARNQAISRLEGLSNLYQIYAESFREWEADPTNPALREEMRIQFNDMNSALTTAIPLLAVQNYQVPLLSVYVQAANLHLSVLRDVSVFGQRWGFDAATINSRYNDLTRLIGNYTDHAVRWYNTGLERVWGPDSRDWVRYNQFRRELTLTVLDIVALFPNYDSRRYPIRTVSQLTREIYTNPVLENFDGSFRGSAQGIERSIRSPHLMDILNSITIYTDAHRGYYYWSGHQIMASPVGFSGPEFTFPLYGTMGNAAPQQRIVAQLGQGVYRTLSSTFYRRPFNIGINNQQLSVLDGTEFAYGTSSNLPSAVYRKSGTVDSLDEIPPQNNNVPPRQGFSHRLSHVSMFRSGSSSSVSIIRAPMFSWIHRSAEFNNIIASDSITQIPAVKGNVLFNGSVISGPGFTGGDLVRLNSSGNNIQNRGYIEVPIHFPSTSTRYRVRVRYASVTPIHLYVNWGNSSIFSNTVPATATSLDNLQSSDFGYFESANAFTSSLGNIVGVRNFSGTAGVIIDRFEFIPVTA

SEQ ID NO: 1386 - protein, 4106 aa, Bacillus thuringiensis
TAGATTTTATATAAGTATAAAAAATAATAAGACTTTAATATAAGTTAAGGGAATACAAATCCTTAATGCATTGGTTAAATATTATAAACTCTAAAGCATGGATGATGGTTGAGAAGTAAGTAGATTATTAACACCCTGGGTCTATTTTAGCCCCAGGGTATAAATTGATATTTAATAAAATCGGTTGCACTTTGAGTATTTTTTCATAGAATGACTCATATGATTAACATTGCAATACAGTAAAAGATCTTTAGTTATAAAGAAAAACTATTACGCTAAAAAGTGGAGGGAACATATGGAGAATAATATTCAAAATCAATGCGTACCTTACAATTGTTTAAGTAATCCTGAGGAGATACTTTTAGATGGAGAAAGAATATCAACTGGTAATTCATCAATTGATATCTCTCTGTCACTTGTCCAGCTTCTGGTATCTAACTTTGTACCAGGGGGAGGATTTTTAGTTGGATTATTAGATTTTGTATGGGGAATAGTAGGCCCTTCTCCATGGGATGCATTTCTAGTGCAAATTGAACAATTAATTAATGAAAGAATAGCTGCATATGCTAGGTCTGCAGCAATTTCTAATTTAGAAGGATTAGGAAACAATTTCAATATATATGTGGAAGCATTTAAAGAATGGGAAGCAGATCCTGATAATCCAGTAACCAGGACTAGAGTAGTTGATCGCTTTCGTATACTTGATGGGCTACTTGAAAGGGACATCCCTTCATTTCGAATTGCTGGATTTGAAGTACCCCTTTTATCCGTTTATGCTCAAGCGGCCAATTTGCATCTAGCTATATTAAGAGATTCTTCAATTTTTGGAGCAAGATGGGGATTGACAACAATAAATGTCAATGAAAACTATAATAGGCTAATTAGGCATATTGATGAATATGCTAATCACTGTGCAGATACGTATAATCGGGGATTAAATAATTTACCAAAATCTACGTATCAAGATTGGATAACATATAATCGATTACGGAGAGACTTAACATTAACTGTATTAGATATCGCTGCTTTCTTTCCAAGCTATGACAATAGGAGATATCCAATTCAGTCAGTTGGTCAACTAACAAGGGAAATTTATACGGACCCATTAATTACTTTTAATCCACAGTTACAGTCTGTAGCTCAATTACCTACTTTTAACGTTATGGAAAGCAACGCAATTAGAACTCCTCATTTATTTGATGTATTGAATAATCTTACAATTTTTACAGATTGGTTTAGTGTTGGACGCAACTTTTATTGGGGAGGACATCGAGTAATATCTAACCGTATAGGAGGAGGTAACATAACATCTCCTATATATGGAAGAGAGGCGAATCAGGAGCCTCCAAGATCTTTTACTTTTAATGGGCCTGTTTTTAGGACTTTATCAAATCCTACTTTTAGACCTTTACAGCAACCTTGGCCAGCGCCACCATTTAATTTACGTGGTGTTGAAGGAGTAGAATTTTCTACACCTTTAAATAGCTTTACGTATCGAGGAAGAGGTACGGTTGATTCTTTAACTGAGTTACCGCCTGAGGATAATAGTGTGCCTCCTCGCGAAGGATATAGTCATCGTTTATGTCATGCAACTTTTGTTCAAAGATCTGGAACCCCATTTTTAACAACTGGTCCAGTATTTTCTTGGACGCATCGTAGTGCTACTGATCGAAATATAATCTACCCGGATGTAATTAACCAAATACCGTTAGTAAAAGCATTCAACCTTACTTCAGGTACCTCTGTAGTCAGAGGTCCAGGATTTACAGGAGGGGATATCATCCGAACTAACGTTAATGGTAGTGTACTAAGTATGAGTCTTAATTTTAGTAACACAACATTACAGCGGTATCGTGTGAGAGTTCGTTATGCTGCTTCTCAAACAATGGTCATGAGCGTAACTGTTGGAGGGAGTACTACTGGTAATCAAGGATTCCCTAGTACTATGAGTGCAAATGGGGCTTTGACATCTCAATCATTTAGATTCGCAGAATTTCCTGTAGGTATTAGTGCATCTGGCAGTCAAGGTGCATCAATAAGTATTAGTAATAATGTAGGTAGACAAATGTTTCACTTAGATAGAATTGAATTTCTCCCAGTTACTTCTACATTTGAGGAGGAATATGATTTAGAAAGAGCGCAAGAGGCGGTGAATGCCCTGTTTACTTCTACGAACCAACTAGGGCTAAAAACAGATGTAACGGATTATCATATTGATCAAGTATCAAATCTAGTTGAATGCTTATCGGATGAATTTTGTCTGGATGAAAAGCGAGAATTGTCTGAGAAAGTCAAACATGCGAAGCGACTCAGCGATGAGCGCAATTTACTCCAGGATCGAAATTTCAGATCCATTAATGGGCAACTAGACCGTGGCTGGAGAGGAAGTACGGATATTACCATCCAAGGTGGAGATGACGTATTCAAAGAGAATTACGTCACACTGCCGGGTACCTTTGATGAGTGCTATCCAACGTATCTATATCAAAAAATAGATGAATCGAAATTAAAATCCTATACACGTTACGAGTTAAGAGGGTATATCGAGGATAGTCAAGATTTAGAAATCTATTTGATTCGCTACAATGCAAAACACGAAATAGTAAATGTACCAGGTACAGGGAGTTTATGGCCTCTTTCTATAGAAAATTCAATTGGGCCTTGTGGAGAACCGAATCGCTGCGCGCCACACCTTGAATGGAATCCTAATCTAGATTGTTCCTGCAGGGACGGGGAAAAATGTGCCCATCATTCCCATCATTTCTCCTTGGACATTGATGTTGGATGTACAGACTTAAATGAGGACTTAGGTGTATGGGTGATCTTCAAGATTAAGACGCAAGATGGCCATGCAAGACTAGGAAATCTAGAGTTTCTCGAAGAGAAACCACTATTAGGGGAAGCACTAGCTCGTGTGAAAAGAGCGGAGAAGAAATGGAGAGACAAACGTGAAAAATTGGAATGGGAAACAAATATTGTTTATAAAGAGGCAAAAGAATCTGTAGATGCTTTATTTGTGAACTCTCAATATGATAGATTACAAGCGGATACGAATATCGCGATGATTCATGCGGCAGATAAACGCGTTCATAGAATTAGAGAAGCATACCTTCCAGAATTATCTGTAATTCCGGGTGTAAATGCGGGCATTTTCGAAGAATTAGAGGGACGCATTTTCACAGCCTACTCTCTATATGATGCGAGAAATGTCATTAAAAATGGCGATTTCAATAATGGTTTATTATGCTGGAACTTGAAAGGGCATGTAGATGTAGAAGAACAAAACAACCATCGTTCAGTCCTTGTTGTCCCGGAATGGGAAGCAGAGGTGTCCCAAGAAGTTCGTGTCTGTCCAGGTCGTGGCTATATCCTTCGTGTTACAGCGTACAAAGAGGGATATGGAGAGGGCTGCGTAACCATTCATGAGATCGAAGACAATACAGACGAACTGAAATTTAGCAACTGTGTTGAAGAGGAAGTATATCCAAACAACACGGTAACGTGTAATGATTATACTGCGACTCAAGAAGAATACGGGGGTGCGTACACTTCCCGTAATCATGGATATGGCAAATCTTATGAAAGTAATTCTTCCGTACAAGCTGATTATGCGTCAGTTTATGAAGAAAAAGCGGACACAGATGGACGAAGAGATAATCATTGCGAATCTAACAGAGGGTATGGGGATTACACGCCACTACCAGCTGGTTATGTAACAAAAGAATTAGAATACTTCCCAGAAACCGATAAGGTATGGGTTGAGATTGGAGAAACGGAAGGAACATTCATTGTGGATAGTGTGGAATTACTCCTTATGGAGGAATAAGGTATGTTTTAAAATGTAGCGTGTGCAAATAAAGAATGTTTACTGACCAGTATTAACAGATAAATAAGAAACTTCTATATAAATAAAAAACGGACATCAATCTTAAGAGAATGATGTCCGTTTTTTGTATGATTTGATTCAACGAGTGATATGTAAATATATTTTTTTGCGAAGTCTTTACATAACAAAAAAATTCGTATAGCAAAATTCTAAATTTAACCTTAAATATAGTTAGGGTGAAAATATGCCAAACTAATTTATTCCGAATGTTAATTCGAAA

SEQ ID NO: 1387 - protein, 1171 aa, Bacillus thuringiensis; identical to SEQ ID NO: 176

SEQ ID NO: 1388 - protein, 4231 aa, Bacillus thuringiensis
GTACCAAATTATAAGAACTTTGGTATTTCAATAAAAGAAAATGGAGGTATTTTATGGAGATAGTGAATAATCAGAATCAATGCGTGCCTTATAATTGTTTAAATAATCCTGAAAATGAGATATTAGATATTGAAAGGTCAAATAGTACTGTAGCAACAAACATCGCCTTGGAGATTAGTCGTCTGCTCGCTTCCGCAACTCCAATAGGGGGGATTTTATTAGGATTGTTTGATGCAATATGGGGGTCTATAGGCCCTTCACAATGGGATTTATTTTTAGAGCAAATTGAGCTATTGATTGACCAAAAAATAGAGGAATTCGCTAGAAACCAGGCAATTTCTAGATTAGAAGGGATAAGCAGTCTGTACGGAATTTATACAGAAGCTTTTAGAGAGTGGGAAGCAGATCCTACTAATCCAGCATTAAAAGAAGAGATGCGTACTCAATTTAATGACATGAACAGTATTCTTGTAACAGCTATTCCTCTTTTTTCAGTTCAAAATTATCAAGTCCCATTTTTATCAGTATATGTTCAAGCTGCAAATTTACATTTATCGGTTTTGAGAGATGTTTCAGTGTTTGGGCAGGCTTGGGGATTTGATATAGCAACAATAAATAGTCGTTATAATGATCTGACTAGACTTATTCCTATATATACAGATTATGCTGTACGCTGGTACAATACGGGATTAGATCGCTTACCACGAACTGGTGGGCTGCGAAACTGGGCAAGATTTAATCAGTTTAGAAGAGAGTTAACAATATCAGTATTAGATATTATTTCTTTTTTCAGAAATTACGATTCTAGATTATATCCAATTCCAACAAGCTCCCAATTAACGCGGGAAGTATATACAGATCCGGTAATTAATATAACTGACTATAGAGTTGGCCCCAGCTTCGAGAATATTGAGAACTCAGCCATTAGAAGCCCCCACCTTATGGACTTCTTAAATAATTTGACCATTGATACGGATTTGATTAGAGGTGTTCACTATTGGGCAGGGCATCGTGTAACTTCTCATTTTACAGGTAGTTCTCAAGTGATAACAACCCCTCAATATGGGATAACCGCAAATGCGGAACCAAGACGAACTATTGCTCCTAGTACTTTTCCAGGTCTTAACCTATTTTATAGAACATTATCAAATCCTTTCTTCCGAAGATCAGAAAATATTACTCCTACCTTAGGGATAAATGTAGTACAGGGAGTAGGGTTCATTCAACCAAATAATGCTGAAGTTCTATATAGAAGTAGGGGGACAGTAGATTCTCTTAATGAGTTACCAATTGATGGTGAGAATTCATTAGTTGGATATAGTCATCGATTAAGTCATGTTACACTAACCAGGTCGTTATATAATACTAATATAACTAGCCTGCCAACATTTGTTTGGACACATCACAGTGCTACTAATACAAATACAATTAATCCAGATATTATTACACAAATACCTTTAGTGAAAGGATTTAGACTTGGTGGTGGCACCTCTGTCATTAAAGGACCAGGATTTACAGGAGGGGATATCCTTCGAAGAAATACCATTGGTGAGTTTGTGTCTTTACAAGTCAATATTAACTCACCAATTACCCAAAGATACCGTTTAAGATTTCGTTATGCTTCCAGTAGGGATGCACGAATTACTGTAGCGATAGGAGGACAAATTAGAGTAGATATGACCCTTGAAAAAACCATGGAAATTGGGGAGAGCTTAACATCTAGAACATTTAGCTATACCAATTTTAGTAATCCTTTTTCATTTAGGGCTAATCCAGATATAATTAGAATAGCTGAAGAACTTCCTATTCGTGGTGGTGAGCTTTATATAGATAAAATTGAACTTATTCTAGCAGATGCAACATTTGAAGAAGAATATGATTTGGAAAGAGCACAGAAGGCGGTGAATGCCCTGTTTACTTCTACAAATCAACTAGGGCTAAAAACAGATGTGACGGATTATCATATTGATCAAGTTTCCAATTTAGTTGAGTGTTTATCGGATGAATTTTGTCTGGATGAAAAGAGAGAATTATCCGAGAAAGTCAAACATGCGAAGCGACTCAGTGATGAACGGAATTTACTTCAAGATTCAAACTTCAGAGGGATCAATAGGCAACCAGACCGTGGCTGGAGAGGAAGCACGGATATTACTATCCAAGGTGGAGATGACGTATTCAAAGAGAATTACGTCACATTACCGGGTACCTTTGATGAGTGCTATCCAACGTATTTATATCAAAAAATAGATGAGTCGAAGTTAAAAGCTTATACCCGCTATGAATTAAGAGGGTATATCGAGGATAGTCAAGACTTAGAAATCTATTTAATTCGCTACAATGCAAAACACGAGACAGTAAACGTGCCAGGTACGGGTTCCTTATGGCCGCTTTCAGCCCAAAGTCCAATCGGAAAGTGTGGAGAACCGAATCGATGCGCGCCACACCTTGAATGGAATCCTAATCTAGATTGCTCCTGCAGAGACGGGGAAAAATGTGCCCATCATTCCCATCATTTCTCCTTGGACATTGATGTTGGATGTACAGACTTAAATGAGGACTTAGGTGTATGGGTGATATTCAAGATTAAGACACAAGATGGCTATGCAAGACTAGGAAATCTAGAGTTTCTCGAAGAGAAACCACTATTAGGGGAAGCACTAGCTCGTGTGAAAAGAGCGGAGAAAAAATGGAGAGACAAATGCGAAAAATTGGAATGGGAAACAAATATTGTTTATAAAGAGGCAAAAGAATCTGTAGATGCTTTATTTGTAAACTCTCAATATGATAGATTACAAGCGGATACGAATATCGCGATGATTCATGCGGCAGATAAACGCGTTCATAGCATTCGAGAAGCGTATCTGCCAGAGCTGTCTGTGATTCCGGGTGTCAATGCGGCTATTTTTGAAGAATTAGAAGGGCGTATTTTCACTGCATTCTCCCTATATGATGCGAGAAATGTCATTAAAAATGGCGATTTCAATAATGGCTTATCATGCTGGAACGTGAAAGGGCATGTAGATGTAGAAGAACAGAACAACCATCGTTCGGTCCTTGTTGTTCCAGAATGGGAAGCAGAAGTGTCACAAGAAGTTCGTGTTTGTCCGGGTCGTGGCTATATCCTTCGTGTTACAGCGTACAAAGAGGGATATGGAGAGGGCTGTGTAACGATTCATGAGATCGAAGACAATACAGACGAACTGAAATTCAGCAACTGTGTAGAAGAGGAAGTATATCCAAACAACACGGTAACGTGTAATAATTATACTGCGACTCAAGAAGAACATGAGGGTACGTACACTTCCCGTAATCGAGGATATGACGAAGCCTATGAAAGCAATTCTTCTGTACATGCGTCAGTCTATGAAGAAAAATCGTATACAGATAGACGAAGAGAGAATCCTTGTGAATCTAACAGAGGATATGGGGATTACACACCACTACCAGCTGGCTATGTGACAAAAGAATTAGAGTACTTCCCAGAAACCGATAAGGTATGGATTGAGATCGGAGAAACGGAAGGAACATTCATCGTGGACAGCGTGGAATTACTTCTTATGGAGGAATAATATATGCTTTAAAATGTAAGGTGTGCAAATAAAGAATGATTACTGACTTGTATTGACAGATAAATAAGGAAATTTTTATATGAATAAAAAACGGGCATCACTCTTAAAAGAATGATGTCCGTTTTTTGTATGATTTAACGAGTGATATTTAAATGTTTTTTTGCGAAGGCTTTACTTAACAAAAAAATTCGTATAGCAAAATTCTAAATTTAACCTTAAATATAGTTAGGGTGAAAATATGCCAAACTAATTTATTCCTAATGTTAATTCGAAACAAATCATAAACAAAAATACAGGTATAAAAAAATTTGTGTAAGACATTTTTTTATACCTGTACTATGAGTGTATTTCCCCTGTTAAAATATTTAATCAAAACTATCATCTTTTTATTATCTTTAGGAATATATGGAGAGTAAAATGAGATTTCATCTAAATAAAAAATAGTAACTACTCAGCCACCTTTTGGTGTCTTTTTTTAATTTTACTAGTTTCATATGCCTCCCATTTGTAAATACTGAGTATATCAAACAGGGGGTGAATAAGATGGTCGATCGAAAACTCATTTTAGATGCATATAAAAAAGGACCTGAAGCTGTTATTTCTTTATTTGAAGAAACATTCTCTAAGTTAGAAAAACGAATTCAAGAACTAGAACACGCTTC

SEQ ID NO: 1389 - protein, 1168 aa, Bacillus thuringiensis
MKNNIQNQCVPYNCLSNPEVEILSEERSTGRLPLDISLSLTRFLLSEFVPGVGVAFGLFDLIWGFITPSEWSLFLLQIEQLIEQRIETLERNRAITTLRGLADSYEVYLEALREWEENPNNAQLREDVRIRFANTDDALITAINNFTLTSFEIPLLSVYVQAANLHLSLLRDAVSFGQGWGLDIATVNNHYNRLINLIHRYTEHCLDTYNQGLENLRGTNTRQWSRFNQFRRELTLTVLDIVALFPNYDARAYPIQTSSQLTREIYTSSVIEDSPVSANIPNGFNRAEFGVRPPHLMDFMNSLFVTAETVRSQTVWGGHLVSSRNTAGNPINFPIYGVFNPGGAIWIADEDPRPFYRTLSDPVFVRGGFGDPHYVLGLRGVGFQQTGTNHTRTFRNSGTIDSLDEIPPQDNSGAPWNDYSHVLNHVTFVRWPGEIAGSDSWRAPMFSWTHRSADRTNIINPNIITQIPAVKAHNLHSGSTVVRGPGFTGGDLLRRTNTGTFADIRVNITGPLSQRYRVRIRYASTTDLQFFTRINGTSVNQGNFQRTMNRGDNLESGNFRTAGFSTPFSFSNAQSTFTLGTQAFSNQEVYIDRIEFVPAEVTFEAESDLERAQKAVNALFTSTSQLGLKTNVTGYHIDQVSNLVACLSDEFCLDEKRELSEKVKHAKRLSDKRNLLQDPNFRGINRQPDHGWRGSTDITIQGGDDVFKENYVTLPGTFDECYPTYLYQKIDESKLKAYTRYQLRGYIEDSQDLEIYLIRYNSKHEIVNVPGTGSLWPLSVENQIGPCGEPNRCAPHLEWNPDLHCSCRDGEKCVHHSHHFSLDIDVGCTDLNEDLGVWLIFKIKTQDGHARLGNLEFLEEEPLLGEALGRVKRAEKKWRDKREKLQLETNIVYKEAKESVDALFVNSQYDRLQADTNIAMIHAADKRVHRIREAYLPELSVIPGVNAAIFEELEGRIFTAYSLYDARNVIKNGNFNNGLLCWNVKGHVDVEEQNNHRSVLVVPEWEAEVSQEVRVCPGRGYILRVTAYKEGYGEGCVTIHEVDNNTDELKFSNCEKEQVYPGNTVACNDYNKNHGANACSSRNRGYDESYESNSSIPADYAPVYEEEAYTDGQRGNPCEFNRGHTPLPAGYVTAELEYFPETDTVWVEIGETEGTFIVDSVELLLMEE

SEQ ID NO: 1390 - protein, 719 aa, Bacillus thuringiensis
MKLKNPDKHQSFSSNAKVDKISTDSLKNETDIELQNINHEDCLKMSEYENVEPFVSASTIQTGIGIAGKILGTLGVPFAGQVASLYSFILGELWPKGKNQWEIFMEHVEEIINQKISTYARNKALTDLKGLGDALAVYHDSLESWVGNRNNTRARSVVKSQYIALELMFVQKLPSFAVSGEEVPLLPIYAQAANLHLLLLRDASIFGKEWGLSSSEISTFYNRQVERAGDYSDHCVKWYSTGLNNLRGTNAESWVRYNQFRRDMTLMVLDLVALFPSYDTQIYPIKTTAQLTREVYTDAIGTVHPHPSFTSTTWYNNNAPSFSAIEAAVVRNPHLLDFLEQVTIYSLLSRWSNTQYMNMWGGHKLEFRTIGGTLNISTQGSTNTSINPVTLPFTSRDVYRTESLAGLNLFSTQPDNGVPRVDFHWKFVTHPIASDNFYYPGYAGIGTQLQDSENELPPEATGQPSYESYSHRLSHIGLISASHVKALVYSWTHRSADRTNTIEPNSITQIPLVKAFNLSSGAAVVRGPGFTGGDILRRTNTGTFGDIRVNINPPFAQRYRVRIRYASTTDLQFHTSINGKAINQGNFSATMNRGEDLDYKTFRTVGFTTPFSFLDVQSTFTIGAWNFSSGNEVYIDRIEFVPVEVTYEAEYDFEKAQEKVTALFTSTNPRGLKTDVKDYHIDQVSNLVESLSDEFYLDEKRELFEIVKYAKQLHIERNM

SEQ ID NO: 1391 - protein, 722 aa, Bacillus thuringiensis
MKLKNQDKHQSFSSNAKVDKISTDSLKNETDIELQNINHEDCLKMSEYENVEPFVSASTIQTGIGIAGKILGTLGVPFAGQVASLYSFILGELWPKGKNQWEIFMEHVEEIINQKISTYARNKALTDLKGLGDALAVYHDSLESWVGNRNNTRARSVVKSQYIALELMFVQKLPSFAVSGEEVPLLPIYAQAANLHLLLLRDASIFGKEWGLSSSEISTFYNRQVERAGDYPDHCVKWYSTGLNNLRGTNAESWVRYNQFRRDMTLMVLDLVALLPSYDTQMYPIKTTAQLTREVYTDAIGTVHPHPSFTSTTWYNNNAPSFSAIEAAVVRNPHLLDFLEQVTIYSLLSRWSNTQYMNMWGGHKLEFRTIGGTLNISTQGSTNTSINPVTLPFTSRDVYRTESLAGLNLFLTQPVNGVPRVDFHWKFVTHPIASDNFYYPGYAGIGTQLQDSENELPPEATGQPNYESYSHRLSHIGLISASHVKALVYSWTHRSADRTNTIEPNSITQIPLVKAFNLSSGAAVVRGPGFTGGDILRRTNTGTFGDIRVNINPPFAQRYRVRIRYASTTDLQFHTSINGKAINQGNFSATMNRGEDLDYKTFRTVGFTTPFSFLDVQSTFTIGAWNFSSGNEVYIDRIEFVPVEVTYEAEYDFEKAQEKVTALFTSTNPRGLKTDVKDYHIDQVSNLVESLSDEFYLDEKRELFEIVKYAKQLHIERNMVDA

SEQ ID NO: 1392 - protein, 717 aa, Bacillus thuringiensis
MKLKNQDKHQSFSSNAKVDKISTDSLKNETDIELQNINHEDCLKMSEYENVEPFVSASTIQTGIGIAGKILGTLGVPFAGQVASLYSFILGEPWPKGKNQWEIFMEHVEEIINQKISTYARNKALTDLKGLGDALAVYHDSLESWVGNRNNTRARSVVKSQYIALELMFVQRLPSFAVSGEEVPLLPIYAQAANLHLLLLRDASIFGKEWRLSSSEISTFYNRQVERAGDYSDHCVKWYSTGLNNLRGTNAESWVRYNQFRRDMTLMVLDLVALFPSYDTQMYPIKTTAQLTREVYTDAIGTVHPHPSFTSTTWYNNNAPSFSAIEAAVVRSPHLLDFLEQVTIYSLLSRWSNTQYMNMWGGHKLEFRTIGGTLNISTQGSTNTSINPVTLPFTSRDVYRTESLAGLNLFLTQPVNGVPRVDFHWKFVTHPIASDNFYYPGYAGIGTQLQDSENELPPEATGQPNYESYSHRLSHIGLISASHVKALVYSWTHRSADRTNTIEPNSITQIPLVKAFNLSSGAAVVRGPGFTGGDILRRTNTGTFGYIRVNINPPFAQRYRVRIRYASTTDLQFHTSINGKAINQGNFSATMNRGEDLDYKTFRTVGFTTPFSFLDVQSTFTIGAWNFSSGNEVYIDRIEFVPVEVTYEAEYDSEKAQEKVTALFTSTNPRGLKTDVKDYHIDQVSNLVESLSDEFYLDEKRELFEIVKYAKQLHIER

SEQ ID NO: 1393 - protein, 722 aa, Bacillus thuringiensis
MKLKNQDKHQSFSSNAKVDKISTDSLKNETDIELQNINHEDCLKMSEYENVEPFVSASTIQTGIGIAGKILGTLGVPFAGQVASLYSFILGELWPKGKSQWEIFMEHVEEIINQKISTYARNKALTDLKGLGDALAVYHDSLESWVGNRNNTRARSVVKSQYIALELMFVQKLPSFAVSGEEVPLLPIYAQAANLHLLLLRDASIFGKEWGLSSSEISTFYNHQVERAGDYSDHCVKWYSTGLNNLRGTNAESWVRYNQFRRDMTLMVLDLVALFPSYDIQMYPIKTTAQLTREVYTDAIGTVHPHPSFTSTTWYNNNAPSFSAIEAAVVRNPHLLDFLEQVTIYSLLSRWSNTQYMNMWGGHKLEFRTIGGTLNISTQGSTNTSINPVTLPFTSRDVYRTESLAGLNLFLTQPVNGVPRVDFHWKFVTHPIASDNFYYPGYAGIGTQLQDSENELPPEATGQPNYESYSHRLSHIGLISASHVKALVYSWTHRSADRTNTIEPNSITQIPLVKAFNLSSGAAVVRGPGFTGGDILRRTNTGTFGDIRVNINPPFAQRYRVRIRYASTTDLQFHTSINGKAINQGNFSATMNRGEDLDYKTFRTVGFTTPFSFLDVQSTFTIGAWNFSSGNEVYIDRIEFVPVEVTYEAEYDFEKAQEKVTALFTSTNPRGLKTDVKDYHIDQVSNLVESLSDEFYLDEKRELFEIVKYAKQLHIERNMVDA

SEQ ID NO: 1394 - protein, 147 aa, Bacillus thuringiensis
MKLKNPDKHQSLSSNAKVDKIATDSLKNETDIELKNMNNEDYLRMSEHESIDPFVSASTIQTGIGIAGKILGTLGVPFAGQIASLYSFILGELWPKGKSQWEIFMEHVEEIINQKILTYARNKALSDLRGLGDALAVYHESLESWVE

SEQ ID NO: 1395 - protein, 719 aa, Bacillus thuringiensis
MKLKNPDKHQTLSSNAKVDKIATDSLKNETDIELKNMNNEDYLRMSEHESIDPFVSASTIQTGIGIAGKILGTLGVPFPGQIASLYSFILGELWPKGKSQWEIFMEHVEAIINRKISTYARNKALTDLKGLGDALAVYHESLESWVGNRNNTRARSVVKNQYIALELMFVQKLPSFAVSGEEVPLLPIYAQAANLHLLLLRDASIFEKNGGLSASEISTFYNRQVERTRDYSYHCVKWNNTGLNNLRATNGQSWVRYNQFRKDIELMVLDLVRVFPSYDTLVYPIKTTSQLTREVYTDAIGTVDPNQALRSTTWYNNNAPSFSAIEAAVIRSPHLLDFLEKVTIYSLLSRWSNTQYMNMWGGHRLESRPIGGALNTSTQGSTNTSINPVTLQFTSRDFYRTESWAGLNLFLTQPVIGVPRVDFHWKFPTLPIASDNFYYLGYAGVGTQLQDSENELPPETTGQPNYESYSHRLSHIGLISASHVKALVYSWTHRSADRTNTIEPNSITQIPLVKAFNLSSGAAVVRGPGFTGGHILRRTKSGTFGHIRVNINPPFAQRYRVRMSYASTTDLQFHTSINGKAINQGNFSATMNRGEDLDYKTFRTVGFTTPFSFSDVQSTFTIGAWNFSSGNEVYIGRIEFVPVEVTYEAEYDFEKAQEKVTALFTSTNPRGLKTDVKDYHIDQVSNLVESLSDELYLDEKRELFEIVKYAKQIHIERNM

SEQ ID NO: 1396 - protein, 381 aa, Bacillus thuringiensis; identical to SEQ ID NO: 225

SEQ ID NO: 1397 - protein, 150 aa, Bacillus thuringiensis
MEINNQKQCIPYNCLSNPEEVLLDGERILPDIDPLEVSLSLLQFLLNNFVPGGGFISGLVDKIWGALRPSEWDLFLAQIERLIDQRIEATVRAKAITELEGLGRNYQIYAEAFKEWESDPDNEAAKSRVIDRFRILDGLIEANIPSFRII

SEQ ID NO: 1398 - protein, 1170 aa, Bacillus thuringiensis
MEINNQNQCIPYNCLSNPEEVLLDGERILPDIDPLEVSMSLLQFLLNNFVPGGGFISGLFDKIWGALRPSDWELFLAQIEQLIDQRIEATVRAKAIAELEGLGRSFQLYVEAFKEWEETPDNTAARSRVTERFRIIDAQIEANIPSFRIPGFEVPLLSVYAQAANLHLALLRDSVIFGERWGLTTTNVNDIYNRQVKRIHEYSDHCVDTYKTELERLGFTSRAQWKIYNQFRRELTLTVLDIVAVFPNYDGKLYPIQTKSELTREIYTSPVSEYYYGAINNYNQNGIQTERQIRQPHLMDFFNTMTMYTSYNRREYYWSGLEMTAYFTGFAGPQVSFPLAGTRGDAAPPFNVRSVNDGIYRILSAPFYSAPFLGTSVLGSRGEEFMFALNNISPPPSARYRNPGTVDSLVSIPPQDNSVPPHRGSSHRLSHVTMRNSSPIFHWTHRSATTTNRINSDVITQIPMVKAYNLHAGATVVRGPGFTGGDILRRTSNGMVVTLRVDASAVRNQRYRIRFRYAATSNFYFVVRRGNLGVNGREIMKTMSTGEELKSASFVLGEFITPFNFFENQVPLQIEIQSLSPGGEVYLDKIEFIPADTTFEAEYDLERAQKAVNALFTSTNQRGLKTDVTDYHIDQVSNLVECLSDEFCLDEKRELSEKVKHAKRLSDERNLLQDPNFTSINGQLDRGWRGSTDITIQGGNDVFKENYVTLPGTFDECYPTYLYQKIDESKLKAYTRYELRGYIEDSQDLEVYLIRYNAKHETLNVPGTDSLRTLSVESQNGRCGELNRCMPHIKWNPDVDCSCRDGEKCAHHSHHFSLDIDVGCTDLQEDLGVWVVFKIKTQEGYARLGNLEFIEEKPLVGEALSRVKRAEKKWRDKREKLELETKRVYTEAKEAVDALFVDSQYDRLQADTNIGMIHAADKLVHRICETYLPELPFIPGINAIIFEELENRISTAFFLYEARNVINNGDFNNGLTCWNVKGHVDVQQSHHRSVLVIPEWEAEVSQKVRVCPGRGYILRVTAYKEGYGEGCVTIHEIEDNTDELKFRNCEEEGDYSNDTGTCNDYPASQGAAGCADVCNSRNVGYKDAYETNTSASVNYKPTYEEETYTDVREDNHCEYDRGYVNYPPLPAGYVTKELEYFPETDTVWIEIGETEGKFIVDSVELLLMEE

SEQ ID NO: 1399 - protein, 1168 aa, Bacillus thuringiensis; identical to SEQ ID NO: 227

SEQ ID NO: 1400 - protein, 725 aa, Bacillus thuringiensis
  MISC_FEATURE (55)..(55): Xaa is Ala, Arg, Asn, Asp, Asx, Cys, Glu, Gln, Glx, Gly, His, Ile, Leu, Lys, Met, Phe, Pro, Ser, Thr, Trp, Tyr, or Val.
  MISC_FEATURE (76)..(76): Xaa is Ala, Arg, Asn, Asp, Asx, Cys, Glu, Gln, Glx, Gly, His, Ile, Leu, Lys, Met, Phe, Pro, Ser, Thr, Trp, Tyr, or Val.
  MISC_FEATURE (477)..(477): Xaa is Ala, Arg, Asn, Asp, Asx, Cys, Glu, Gln, Glx, Gly, His, Ile, Leu, Lys, Met, Phe, Pro, Ser, Thr, Trp, Tyr, or Val.
  MISC_FEATURE (600)..(600): Xaa is Ala, Arg, Asn, Asp, Asx, Cys, Glu, Gln, Glx, Gly, His, Ile, Leu, Lys, Met, Phe, Pro, Ser, Thr, Trp, Tyr, or Val.
  MISC_FEATURE (604)..(604): Xaa is Ala, Arg, Asn, Asp, Asx, Cys, Glu, Gln, Glx, Gly, His, Ile, Leu, Lys, Met, Phe, Pro, Ser, Thr, Trp, Tyr, or Val.
  MISC_FEATURE (619)..(619): Xaa is Ala, Arg, Asn, Asp, Asx, Cys, Glu, Gln, Glx, Gly, His, Ile, Leu, Lys, Met, Phe, Pro, Ser, Thr, Trp, Tyr, or Val.
  MISC_FEATURE (623)..(623): Xaa is Ala, Arg, Asn, Asp, Asx, Cys, Glu, Gln, Glx, Gly, His, Ile, Leu, Lys, Met, Phe, Pro, Ser, Thr, Trp, Tyr, or Val.
  misc_feature (624)..(624): Xaa can be any naturally occurring amino acid
  MISC_FEATURE (636)..(636): Xaa is Ala, Arg, Asn, Asp, Asx, Cys, Glu, Gln, Glx, Gly, His, Ile, Leu, Lys, Met, Phe, Pro, Ser, Thr, Trp, Tyr, or Val.
  MISC_FEATURE (637)..(637): Xaa is Ala, Arg, Asn, Asp, Asx, Cys, Glu, Gln, Glx, Gly, His, Ile, Leu, Lys, Met, Phe, Pro, Ser, Thr, Trp, Tyr, or Val.
  MISC_FEATURE (647)..(647): Xaa is Ala, Arg, Asn, Asp, Asx, Cys, Glu, Gln, Glx, Gly, His, Ile, Leu, Lys, Met, Phe, Pro, Ser, Thr, Trp, Tyr, or Val.
  MISC_FEATURE (653)..(653): Xaa is Ala, Arg, Asn, Asp, Asx, Cys, Glu, Gln, Glx, Gly, His, Ile, Leu, Lys, Met, Phe, Pro, Ser, Thr, Trp, Tyr, or Val.
  MISC_FEATURE (712)..(712): Xaa is Ala, Arg, Asn, Asp, Asx, Cys, Glu, Gln, Glx, Gly, His, Ile, Leu, Lys, Met, Phe, Pro, Ser, Thr, Trp, Tyr, or Val.
MCGFTPTRSREQVAEISLGLTRFLLENLFPGSTFGFGLIDIIWGIFGPDQWSMFXEQIEQLIDQRIETVERNRANXNINWVINSYDVYIEALKEWENNPDNSASQERVRNRFRTTDDALITGIPLLAIPNFEIATLSVYVQAANLHLSLLRDAVFFGERWGLTQINVDDLYRRLTNNIRTNSDHCARWYNEGLDNISGLSRSINFQREVTISVLDIVALFPNYDIRTYPISTTSQLTREIFTSPIVVPNDFSVAYEGVRRAPHLFEFLEKLVIYTGDRSGIRHWAGHEITSRRTDSYHGIIRYPLYGTAANAESPYTLALQPSGSIYRTLSEPIFSQTGGLSPHRRRVVEGVEFSIVNNNVNPSSFVYRRKGSLDSFTELPPEDESVPPYIGYSHQLCHVGFGRTNVIFEPSNFARVPVFSWTHRSATPTNTIDPDRITQIPSVKASSLRNSTVVSGPGFTGGDIVRMGAVHQIYAXDLSMNVRPSVALSRYLIRLRYACRGSSNIVIHGPSIRFVSLPSTMSNDEPLTYQSFRYASITTPITRPIYNMFNLSISRISGVQNLFIDRIEFIPVDANFEAERDLERAQKAVNALFTSTNQXGLKXDVTDYHIDQVSNLVXCLSDXFCLDEKRELSEKXKHAKRLSDEXNLLQDXNFTGINRQVDRGWRGSTDITIQGGNDVFKENYVTLPGTFDECYPTYLYQKIDESKLKPXTRYELRGYIEDSQ

SEQ ID NO: 1401 - protein, 1170 aa, Bacillus thuringiensis; identical to SEQ ID NO: 1398

SEQ ID NO: 1402 - protein, 1167 aa, Bacillus thuringiensis
MTNPTILYPSYHNVLAHPIRLDSFFDPFVETFKDLKGAWEEFGKTGYMDPLKQHLQIAWDTSQNGTVDYLALTKASISLIGLIPGADAVVPFINMFVDFIFPKLFGRGSQQNAQAQFFELIIEKVKELVDEDFRNFTLNNLLNYLDGMQTALSHFQNDVQIAICQGEQPGLMLDQTPTACTPTTDHLISVRESFKDARTTIETALPHFKNPMLSTNDNTPDFNSDTVLLTLPMYTTGATLNLILHQGYIQFAERWKSVNYDESFINQTKVDLQRRIQDYSTTVSTTFEKFKPTLNPSNKESVNKYNRYVRSMTLQSLDIAATWPTLDNVNYPSNVDIQLDQTRLVFSDVAGPWEGNDNITSNIIDVLTPINTGIGFQESSDLRKFTYPRIELQSMQFHGQYVNSKSVEHCYSDGLKLNYKNKTITAGVSNIDESNQNNKHNYGPVINSPITDINVNSQNSQYLDLNSVMVNGGQKVTGCSPLSSNGNSNNAALPNQKINVIYSVQSNDKPEKHADTYRKWGYMSSHIPYDLVPENVIGDIDPDTKQPSLLLKGFPAEKGYGDSIAYVSEPLNGANAVKLTSYQVLQMEVTNQTTQKYRIRIRYATGGDTAASIWFHIIGPSGNDLTNEGHNFSSVSSRNKMFVQGNNGKYVLNILTDSIELPSGQQTILIQNTNSQDLFLDRIEFISLPSTSTPTSTNFVEPESLEKIINQVNQLFSSSSQTELAHTVSDYKIDQVVLKVNALSDDVFGVEKKALRKLVNQAKQLSKARNVLVGGNFEKGHEWALSREATMVANHELFKGDHLLLPPPTLYPSYAYQKIDESKLKSNTRYTVSGFIAQSEHLEVVVSRYGKEVHDMLDIPYEEALPISSDESPNCCKPAACQCSSCDGSQSDSHFFSYSIDVGSLQSDVNLGIEFGLRIAKPNGFAKISNLEIKEDRPLTEKEIKKVQRKEQKWKKAFNQEQAEVATTLQPTLDQINALYQNEDWNGSVHPASDYQHLSAVVVPTLPKQRHWFMEGREGEHVVLTQQFQQALDRAFQQIEEQNLIHNGNLANGLTDWTVTGDAQLTIFDEDPVLELAHWDASISQTIEIMDFEGRHRIQTACTWKRQRNSYRSTWRKRLETMTFNTTSFTTQEQTFYFEGDTVDVHVQSENNTFLIDSVELIEIIEE

SEQ ID NO: 1403 - protein, 1167 aa, Bacillus thuringiensis
MTNPTILYPSYHNVLAHPIRLDSFFDPFVETFKDLKGAWEEFGKTGYMDPLKQHLQIAWDTSQNGTVDYLALTKASISLIGLIPGADAVVPFINMFVDFIFPKLFGRGSQQNAQAQFFELIIEKVKELVDEDFRNFTLNNLLNYLDGMQTALSHFQNDVQIAICQGEQPGLMLDQTPTACTPTTDHLISVRESFKDARTTIETALPHFKNPMLSTNDNTPDFNSDTVLLTLPMYTTAATLNLILHQGYIQFAERWKSVNYDESFINQTKVDLQRRIQDYSTTVSTTFEKFKPTLNPSNKESVNKYNRYVRSMTLQSLDIAATWPTLDNVNYPSNVDIQLDQTRLVFSDVAGPWEGNDNITSNIIDVLTPINTGIGFQESSDLRKFTYPRIELQSMQFHGQYVNSKSVEHCYSDGLKLNYKNKTITAGVSNIDESNQNNKHNYGPVINSPITDINVNSQNSQYLDLNSVMVNGGQKVAGCSPLSSNGNSNNAALPNQKINVIYSVQSNDKPEKHADTYRKWGYMSSHIPYDLVPENVIGDIDPDTKQPSLLLKGFPAEKGYGDSIAYVSEPLNGANAVKLTSYQVLKMEVTNQTTQKYRIRIRYATGGDTAASIWFHIIGPSGNDLTNEGHNFSSVSSRNKMFVQGNNGKYVLNILTDSIELPSGQQTILIQNTNSQDLFLDRIEFISLPSTSTPTSTNFVEPESLEKIINQVNQLFSSSSQTELAHTVSDYKIDQVVLKVNALSDDVFGVEKKALRKLVNQAKQLSKARNVLVGGNFEKGHEWALSREATMVANHELFKGDHLLLPPPTLYPSYAYQKIDESKLKSNTRYTVSGFIAQSEHLEVVVSRYGKEVHDMLDIPYEEALPISSDESPNCCKPAACQCSSCDGSQSDSHFFSYSIDVGSLQSDVNLGIEFGLRIAKPNGFAKISNLEIKEDRPLTEKEIKKVQRKEQKWKKAFNQEQAEVATTLQPTLDQINALYQNEDWNGSVHPHVTYQHLSAVVVPTLPKQRHWFMEDREGEHVVLTQQFQQALDRAFQQIEEQNLIHNGNFANGLTDWTVTGDAQLTIFDEDPVLELAHWDASISQTIEIMDFEEDTEYKLRVRGKGKGTVTVQHGEEELETMTFNTTSFTTQEQTFYFEGDTVDVHVQSENNTFLIDSVELIEIIEE

SEQ ID NO: 1404 - protein, 2172 aa, Bacillus thuringiensis
ATGAAAGAACAAAATCTAAATAAATATGATGAAATAACTGTACAAGCAGCAAGCGATTATATCGACATTCGTCCGATTTTTCAAACAAATGGATCTGCTACATTTAATTCTAATACCAATATTACAACTTTAACACAAGCTATAAATAGTCAAGCAGGAGCAATTGCAGGAAAGACTGCTCTAGATATGAGACATGACTTTACTTTTAGAGCAGATATTTTTCTTGGAACTAAAAGTAACGGAGCAGACGGTATTGCAATCGCATTTCATAGAGGATCAATTGGGTTTGTTGGAACAAAAGGCGGAGGACTTGGAATATTAGGTGCACCTAAAGGGATAGGGTTTGAATTAGACACATATGCGAATGCACCTGAGGACGAAGTAGGCGATTCGTTTGGGCATGGGGCAATGAAAGGATCATTCCCTAGTTTCCCAAATGGATATCCCCATGCTGGCTTTGTAAGTACTGATAAAAATAGTAGATGGTTATCAGCTCTAGCTCAGATGCAGCGAATCGCTGCTCCAAACGGGCGTTGGAGACGTCTGGAGATTCGTTGGGATGCTCGTAATAAAGAGTTAACTGCAAATCTTCAGGATTTAACTTTTAATGACATAACTGTTGGAGAGAAGCCACGTACTCCAAGAACTGCAACTTGGAGGTTAGTAAATCCTGCATTTGAACTTGATCAGAAGTATACTTTTGTTATTGGTTCGGCGACGGGTGCATCTAATAACCTACATCAGATTGGGATTATAGAATTTGATGCATACTTTACTAAACCGACAATAGAAGCGAATAATGTAAATGTCCCAGTGGGAGCAACATTTAATCCAAAAACATATCCAGGAATAAATTTAAGAGCAACAGATGAGATAGATGGGGATTTGACATCGAAGATTATTGTGAAAGCAAACAATGTTAATACGTCGAAAACGGGTGTGTATTATGTGACGTATTATGTAGAGAATAGTTATGGGGAAAGTGATGAAAAAACAATCGAAGTAACTGTGTTTTCAAACCCTACAATTATTGCAAGTGATGTTGAAATTGAAAAAGGGGAATCTTTTAACCCACTAACTGATTCAAGAGTAGGTCTTTCTGCACAGGATTCATTAGGCAATGATATTACCCAAAATGTAAAGGTAAAATCGAGTAATGTGGATACTTCAAAGCCAGGGGAATATGAAGTTGTATTTGAAGTGACAGATAGCTTTGGTGGAAAAGCAGAAAAAGATTTCAAGGTTACAGTTTTAGGACAGCCAAGTATAGAAGCGAATAATGTTGAATTAGAAATAGATGATTCATTGGATCCATTAACAGATGCAAAAGTAGGTCTCCGTGCAAAGGATTCATTAGGTAATGATATTACGAAAGACATAAAAGTAAAGTTCAATAACGTAGATACTTCAAATTCAGGAAAGTATGAAGTTATATTTGAAGTGACGGACCGTTTTGGAAAAAAAGCAGAAAAAAGTATTGAAGTCCTTGTTCTAGGAGAACCAAGCATTGAAGCAAATGATGTTGAGGTTAATAAAGGTGAAACGTTTGAACCATTAACAGATTCAAGAGTTGGCCTCCGTGCAAAAGACTCATTAGGTAATGATATTACGAAAGATGTGAAAATAAAATCAAGTAATGTGGATACTTCAAAACCAGGTGAATATGAAGTTGTATTTGAAGTGACAGATCGTTTTGGTAAATATGTAGAAAAAACAATTGGAGTTATAGTGCCAGTAATTGATGATGAATGGGAAGATGGAAATGTGAATGGTTGGAAATTCTATGCTGGGCAAGATATTAAACTGTTGAAGGATCCTGATAAAGCCTATAAAGGCGATTATGTATTCTATGATTCTAGACACGTTGCTATTTCTAAAACAATTCCACTAACGGATTTGCAAATAAATACAAACTATGAAATTACAGTGTATGCTAAAGCAGAAAGCGGCGATCATCACTTAAAAGTGACGTATAAGAAAGACCCGGCAGGTCCAGAAGAGCCGCCAGTTTTCAATAGACTGATTAGCACAGGCACATTGGTAGAAAAAGATTATAGAGAATTAAAAGGGACGTTCCGCGTAACAGAATTAAACAAAGCACCATTGATAATCGTAGAGAATTTTGGAGCTGGATATATAGGTGGAATTAGAATTGTGAAAATATCGTAATAA

SEQ ID NO: 1405 - protein, 633 aa, Bacillus thuringiensis
MNSVLNSRRTTICDAYNVVAHDPFSFEHKSLDTIQKEWMEWKRTDHSLYVAPVVGTVSSFLLKKVGSLIGKRILSELWGIIFPSGSTNLMQDILRETEQFLNQRLNTDTLARVNAELIGLQANIREFNQQVDNFLNPTQNPVPLSITSSVNTMQQLFLNRLPQFQIQGYQLLLLPLFAQAANMHLSFIRDVILNADEWGISAATLRTYRDYLRNYTRDYSNYCINTYQTAFRGLNTRLHDMLEFRTYMFLNVFEYVSIWSLFKYQSLMVSSGANLYASGSGPQQTQSFTAQNWPFLYSLFQVNSNYILSGISGTRLSITFPNIGGLPGSTTTHSLNSARVNYSGGVSSGLIGATNLNHNFNCSTVLPPLSTPFVRSWLDSGTDREGVATSTNWQTESFQTTLSLRCGAFSARGNSNYFPDYFIRNISGVPLVIRNEDLTRPLHYNQIRNIESPSGTPGGARAYLVSVHNRKNNIYAANENGTMIHLAPEDYTGFTISPIHATQVNNQTRTFISEKFGNQGDSLRFEQSNTTARYTLRGNGNSYNLYLRVSSIGNSTIRVTINGRVYTVSNVNTTTNNDGVNDNGARFSDINIGNIVASDNTNVTLDINVTLNSGTPFDLMNIMFVPTNLSPLY

SEQ ID NO: 1406 - protein, 633 aa, Bacillus thuringiensis; identical to SEQ ID NO: 266

SEQ ID NO: 1407 - protein, 633 aa, Bacillus thuringiensis serovar israelensis
MNTVLNSGRTTICDAYNVAAHDPFSFQHKSLDTVQKEWTEWKKNNHSLYLDPIVGTVASFLLKKVGSLVGKRILSELRNLIFPSGSTNLMQDILRETEKFLNQRLNTDTLARVNAELTGLQANVEEFNRQVDNFLNPNRNAVPLSITSSVNTMQQLFLNRLPQFQMQGYQLLLLPLFAQAANLHLSFIRDVILNADEWGISAATLRTYRDYLKNYTRDYSNYCINTYQSAFKGLNTRLHDMLEFRTYMFLNVFEYVSIWSLFKYQSLLVSSGANLYASGSGPQQTQSFTSQDWPFLYSLFQVNSNYVLNGFSGARLSNTFPNIVGLPGSTTTHALLAARVNYSGGISSGDIGASPFNQNFNCSTFLPPLLTPFVRSWLDSGSDREGVATVTNWQTESFETTLGLRSGAFTARGNSNYFPDYFIRNISGVPLVVRNEDLRRPLHYNEIRNIASPSGTPGGARAYMVSVHNRKNNIHAVHENGSMIHLAPNDYTGFTISPIHATQVNNQTRTFISEKFGNQGDSLRFEQNNTTARYTLRGNGNSYNLYLRVSSIGNSTIRVTINGRVYTATNVNTTTNNDGVNDNGARFSDINIGNVVASSNSDVPLDINVTLNSGTQFDLMNIMLVPTNLPPLY

SEQ ID NO: 1408 - protein, 633 aa, Bacillus thuringiensis
MNSVLNSGRTTICDAYNVAAHDPFSFQHKSLDTVQKEWTEWKKNNHSLYLDPIVGTVASFLLKKVGSLVGKRILSELRNLIFPSGSTNLMQDILRETEKFLNQRLNTDTLARVNAELTGLQANVEEFNRQVDNFLNPNRNAVPLSITSSVNTMQQLFLNRLPQFQMQGYQLLLLPLFAQAASLHLSFIRDVILNADEWGISAATLRTYRDYLKNYTRDYSNYCINTYQSAFKGLNTRLHDMLEFRTYMFLNVFEYVSIWSLFKYQSLLVSSGANLYASGSGPQQTQSFTSQDWPFLYSLFQVNSNYVLNGFSGARLSNTFPNIVGLPGSTTTHALLAARVNYSGGISSGDIGASPFNQNFNCSTFLPPLLTPFVRSWLDSGSDREGVATVTNWQTESFETTLGLRSGAFTARGNSNYFPDYFIRNISGVPLVVRNEDLRRPLHYNEIRNIASPSGTPGGARAYMVSVHNRKNNIHAVHENGSMIHLAPNDYTGFTISPIHATQVNNQTRTFISEKFGNQGDSLRFEQNNTTARYTLRGNGNSYNLYLRVSSIGNSTIRVTINGRVYTATNVNTTTNNDGVNDNGARFSDINIGNVVASSNSDVPLDINVTLNSGTQFDLMNIMLVPTNLPPLY

SEQ ID NO: 1409 - protein, 633 aa, Bacillus thuringiensis
MNSVLNIGRTTICDAYNVAAHDPFSFQHKSLDTVQKEWTEWKKNNHSLYLDPIVGTVASFLLKKVGSLVGKRILSELRNLIFPSGSTNLMQDILRETEKFLNQRLNTDTLARVNAELTGLQANVEEFNRQVDNFLNPNRNAVPLSITSSVNTMQQLFLNRLPQFQMQGYQLLLLPLFAQAANLHLSFIRDVILNADEWGISAATLRTYRDYLKNYTRDYSNYCINTYQSAFKGLNTRLHDMLEFRTYMFLNVFEYVSIWSLFKYQSLLVSPGANLYASGSGPQQTQSFTSQDWPFLYSLFQVNSNYVLNGFSGARLSNTFPNIVGLPGSTTTHALLAARVNYSGGISSGDIGASPFNQNFNCSTFLPPLLTPFVRSWLDSGSDREGVATVTNWQTESFETTLGLRSGAFTARGNSNYFPDYFIRNISGVPLVVRNEDLRRPLHYNEIRNIASPSGTPGGARAYMVSVHNRKNNIHAVHENGSMIHLAPNDYTGFTISPIHATQVNNQTRTFISEKFGNQGDSLRFEQNNTTARYTLRGNGNSYNLYLRVSSIGNSTIRVTINGRVYTATNVNTTTNNDGVNDNGARFSDINIGNVVASSNSDVPLDINVTLNSGTQFDLMNIMLVPTNIPPLY

SEQ ID NO: 1410 - protein, 633 aa, Bacillus thuringiensis
MNSVLNTGRTTICDAYNVAAHDPFSFQHKSLDTVQKEWTEWKKNNHSLYLDPIVGTVASFLLKKVGSLVGKRILSELRNLIFPSGSTNLMQDILRETEKFLNQRLNTDTLARVNAELTGLQANVEEFNRQVDNFLNPNRNAVPLSITSSVNTMQQLFLNRLPQFQMQGYQLLLLPLFAQAANLHLSFIRDVILNADEWGISAATLRTYRDYLKNYTRDYSNYCINTYQSAFKGLNTRLHDMLEFRTYMFLNVFEYVSIWSLFKYQSLLVSSGANLYASGSGPQQTQSFTSQDWPFLYSLFQVNSNYVLNGFSGARLSNTFPNIVGLPGSTTTHALLAARVNYSGGISSGDIGASPFNQNFNCSTFLPPLLTPFVRSWLDSGSDREGVATVTNWQTESFETTLGLRSGAFTARGNSNYFPDYFIRNISGVPLVVRNEDLRRPLHYNEIRNIASPSGTPGGARAYMVSVHNRKNNIHAVHENGSMIHLAPNDYTGFTISPIHATQVNNQTRTFISEKFGNQGDSLRFEQNNTTARYTLRGNGNSYNLYLRVSSIGNSTIRVTINGRVYTATNVNTTTNNDGVNDNGARFSDINIGNVVASSNSDVPLDINVTLNSGTQFDLMNIMLVPTNISPLY

SEQ ID NO: 1411 - protein, 142 aa, Bacillus thuringiensis
MNNVLNSRRTTICDAYNVAAHDPFSFQHKSLDTVQKEWTEWKKNNHSLYLDPIVGTVASFLLKKVGSLVGKRILSELRNLIFPSGSTNLMQDILRETEKFLNQRLNTDTLARVNAELTGLQANVEEFNRQVDNFLNPNRNAV

SEQ ID NO: 1412 - protein, 632 aa, Bacillus thuringiensis
MNTVLNSGRTTICDAYNVAAHDPFSFQHKSLDTVQKEWTEWKKNNHSLYLDPIVGTVASFLLKKVGSLVGKRILSELRNLIFPSGSTNLMQDILRETEKFLNQRLNTDTLARVNAELTGLQANVEEFNRQVDNFLNPNRNAVPLSITSSVNTMQQLFLNRLPQFQMQGYQLLLLPLFAQAANLHLSFIRDVILNADEWGISAATLRTYRDYLKNYTRDYSNYCINTYQSAFKGLNTRLHDMLEFRTYMFLNVFEYVSIWSLFKYQSLLVSSGANLYASGSGPQQTQSFTSQDWPFLYSLFQVNSNYVLNGFSGARLSNTFPNIVGLPGSTTTHALLAARVNYSGGISSGDIGASPFNQNFNCSTFLPPLLTPFVRSWLDSGSDREGVATVTNWQTESFETTLGLRSGAFTARGNSNYFPDYFIRNISGVPLVVRNEDLRRPLHYNEIRNIASPSGTPGGARAYMVSVHNRKNNIHAVHENGSMIHLAPNDYTGFTISPIHATQVNNQTRTFISEKFGNQGDSLRFEQNNTTARYTLRGNGNSYNLYLRVSSIGNSTIRVTINGRVYTATNVNTTTNNDGVNDNGARFSDINIGNVVASSNSDVPLDINVTLNSGTQFDLMNIMLVPTNLPPL

SEQ ID NO: 1413 - protein, 142 aa, Bacillus thuringiensis
MNTVLNSGRTTICDAYNVAAHDPFSFQHKSLDTVQKEWTEWKKNNHSLYLDPIVGTVASFLLKKVGSLVGKRILSELRNLIFPSGSTNLMQDILRETEKFLNQRLNTDTLARVNAELTGLQANVEEFNRQVDNFLNPNRNAV

SEQ ID NO: 1414 - protein, 633 aa, Bacillus thuringiensis
MNSVLNNGRTTICDAYNVAAHDPFSFQHKSLDTVQKEWTEWKKNNHSLYLDPIVGTVASFLLKKVGSLVGKRILSELRNLIFPSGSTNLMQDILRETEKFLNQRLNTDTLARVNAELTGLQANVEEFNRQVDNFLNPNRNAVPLSITSSVNTMQQLFLNRLPQSQMQGYQLLLLPLFAQAANLHLSFIRDVILNADEWGISAATLRTYRDYLKNYTRDYSNYCINTYQSAFKGLNTRLHDMLEFRTYMFLNVFEYVSIWSLFKYQSLLVSSGANLYASGSGPQQTQSFTSQDWPFLYSLFQVNSNYVLNGFSGARLSNTFPNIVGLPGSTTTHALLAARVNYSGGISSGDIGASPFNQNFNCSTFLPPLLTPFVRSWLDSGSDREGVATVTNWQTESFETTLGLRSGAFTARGNSNYFPDYFIRNISGVPLVVRNEDLRRPLHYNEIRNIASPSGTPGGARAYMVSVHNRKNNIHAVHENGSMIHLAPNDYTGFTISPIHATQVNNQTRTFISEKFGNQGDSLRFEQNNTTARYTLRGNGNSYNLYLRVSSIGNSTIRVTINGRVYTATNVNTTTNNDGVNDNGARFSDINIGNVVASSNSDVPLDINVTLNSGTQFDLMNIMLVPTNIPPLY

SEQ ID NO: 1415 - protein, 1902 aa, Bacillus thuringiensis
ATGAATAGTGTATTGAATAGCGGAAGAACTACTATTTGTGATGCGTATAATGTAGCGGCTCATGATCCATTTAGTTTTCAACACAAATCATTAGATACCGTACAAAAGGAATGGACGGAGTGGAAAAAAAATAATCATAGTTTATACCTAGATCCTATTGTTGGAACTGTGGCTAGTTTTCTGTTAAAGAAAGTGGGGAGTCTTGTTGGAAAAAGGATACTAAGTGAGTTACGGAATTTAATATTTCCTAGTGGTAGTACAAATCTAATGCAAGATATTTTAAGAGAGACAGAAAAATTCCTGAATCAAAGACTTAATACAGACACTGTTGCCCGTGTAAATGCGGAATTGACAGGGCTGCAAGCAAATGTAGAAGAGTTTAATCGACAAGTAGATAATTTTTTGAACCCTAACCGAAACGCTGTTCCTTTATCAATAACTTCTTCAGTTAATACAATGCAACAATTATTTCTAAATAGATTACCCCAGTTCCAGATGCAAGGATACCAACTGTTATTATTACCTTTATTTGCACAGGCAGCCAATTTACATCTTTCTTTTATTAGAGATGTTATTCTAAATGCAGATGAATGGGGAATTTCAGCAGCAACATTACGTACGTATCGAGATTACTTGAAAAATTATACAAGAGATTACTCTAACTATTGTATAAATACGTATCAAAGTGCGTTTAAAGGTTTAAACACTCGTTTACACGATATGTTAGAATTTAGAACATATATGTTTTTAAATGTATTTGAATATGTATCTATCTGGTCGTTGTTTAAATATCAAAGTCTTCTAGTATCTTCCGGTGCTAATTTATATGCAAGTGGTAGTGGACCACAGCAGACCCAATCATTTACTTCACAAGACTGGCCATTTTTATATTCTCTTTTCCAAGTTAATTCAAATTATGTGTTAAATGGATTTAGTGGTGCTAGGCTTTCTAATACCTTCCCTAATATAGTTGGTTTACCTGGTTCTACTACAACTCACGCATTGCTTGCTGCAAGGGTTAATTACAGTGGAGGAATTTCGTCTGGTGATATAGGTGCATCTCCGTTTAATCAAAATTTTAATTGTAGCACATTTCTCCCCCCATTGTTAACGCCATTTGTTAGGAGTTGGCTAGATTCAGGTTCAGATCGGGAGGGCGTTGCCACCGTTACAAATTGGCAAACAGAATCCTTTGAGACAACTTTAGGGTTAAGGAGTGGTGCTTTTACAGCTCGCGGTATTTCAAACTATTTCCCAGATTATTTTATTCGTAATATTTCTGGAGTTCCTTTAGTTGTTAGAAATGAAGATTTAAGAAGACCGTTACACTATAATGAAATAAGAAATATAGCAAGTCCTTCAGGAACACCTGGTGGAGCACGAGCTTATATGGTATCTGTGCATAACAGAAAAAATAATACCCATGCCGTTCATGAAAATGGTTCTATGATTCATTTAGCGCCAAATGACTATACAGGATTTACTATTTCGCCGATACATGCAACTCAAGTGAATAATCAAACACGAACATTTATTTCTGAAAAATTTGGAAATCAAGGTGATTCCTTAAGGTTTGAACAAAATAACACGACAGCTCGTTATACGCTTAGAGGGAATGGAAATAGTTACAATCTTTATTTAAGAGTTTCTTCAATAGGAAATTCCACTATTCGAGTTACTATAAACGGTAGGGTATATACTGCTACAAATGTTAATACTACTACAAATAACGATGGAGTTAATGATAACGGAGCTCGTTTTTCAGATATTAATATCGGTAATGTAGTAGCAAGTAGTAATTCTGATGTACCATTAGATATAAATGTAACATTAAACTCCGGTACTCAATTTGATCTTATGAATATTATGCTTGTACCAACTAATATTTCACCACTTTATTAA

SEQ ID NO: 1416 - protein, 633 aa, Bacillus thuringiensis
MNNVLNSGRNITCHAHNVVAHDPFSFEHKSLNTIEKEWKEWKRTDHSLYVAPIVGTVGSFLLKKVGSLVGKRILSELQNLIFPSGSIDLMQEILRATEQFINQRLNADTLGRVNAELAGLQANVAEFNRQVDNFLNPNQNPVPLAIIDSVNTLQQLFLSRLPQFQIQGYQLLLLPLFAQAANLHLSFIRDVILNADEWGISAATVRTYRDHLRNFTRDYSNYCINTYQTAFRGLNTRLHDMLEFRTYMFLNVFEYVSIWSLFKYQSLMVSSGANLYASGSGPQQTQSFTAQNWPFLYSLFQVNSNYILSGISGTRLSITFPNIGGLPGSTTTHSLNSARVNYSGGVSSGLIGATNLNHNFNCSTVLPPLSTPFVRSWLDSGTDREGVATSTNWQTESFQTTLSLRCGAFSARGNSNYFPDYFIRNISGVPLVIRNEDLTRPLHYNQIRNIESPSGTPGGARAYLVSVHNRKNNIYAANEYGTMIHLAPEDYTGFTISPIHATQVNNQTRTFISEKFGNQGDSLRFEQSNTTARYTLRGNGNSYNLYLRASSIGNSTIRVTINGRAYTVSNVNTTTNNDGVNDNGARFSDINIGNIVASDNTNVTLDINVTLNSGTPFDLMNIMFVPTNLPPLY

SEQ ID NO: 1417 - protein, 1152 aa, Bacillus thuringiensis
ATGTTAGATACTAATAAAGTTTATGAAATAAGTAATCATGCTAATGGACTATATGCAGCAACTTATTTAAGTTTAGATGATTCAGGTGTTAGTTTAATGAATAAAAATGATGATGATATTGATGATTATAACTTAAAATGGTTTTTATTTCCTATTGATGATGATCAATATATTATTACAAGCTATGCAGCAAATAATTGTAAAGTTTGGAATGTTAATAATGATAAAATAAATGTTTCGACTTATTCTTCAACAAATTCAATACAAAAATGGCAAATAAAAGCTAATGGTTCTTCATATGTAATACAAAGTGATAATGGAAAAGTCTTAACAGCAGGAACCGGTCAAGCTCTTGGATTGATACGTTTAACTGATGAATCCTCAAATAATCCCAATCAACAATGGAATTTAACTTCTGTACAAACAATTCAACTTCCACAAAAACCTATAATAGATACAAAATTAAAAGATTATCCCAAATATTCACCAACTGGAAATATAGATAATGGAACATCTCCTCAATTAATGGGATGGACATTAGTACCTTGTATTATGGTAAATGATCCAAATATAGATAAAAATACTCAAATTAAAACTACTCCATATTATATTTTAAAAAAATATCAATATTGGCAACGAGCAGTAGGAAGTAATGTAGCTTTACGTCCACATGAAAAAAAATCATATACTTATGAATGGGGAACAGAAATAGATCAAAAAACAACAATCATAAATACATTAGGATTTCAAATCAATATAGATTCAGGAATGAAATTTGATATACCAGAAGTAGGTGGAGGTACAGATGAAATAAAAACACAACTAAATGAAGAATTAAAAATAGAATATAGTCGTGAAACTAAAATAATGGAAAAATATCAAGAACAATCTGAAATAGATAATCCAACTGATCAACCAATGAATTCTATAGGATTTCTTACTATTACTTCTTTAGAATTATATAGATATAATGGCTCAGAAATTCGTATAATGCAAATTCAAACCTCAGATAATGATACTTATAATGTTACTTCTTATCCAGATCATCAACAAGCTTTATTACTTCTTACAAATCATTCATATGAAGAAGTAGAAGAAATAACAAATATTCCTAAAAGTACACTAAAAAAATTAAAAAAATATTATTTTTAA

SEQ ID NO: 1418 - protein, 1291 aa, Bacillus thuringiensis
GAAAGATCCAATTTTTTCACTTAATACTCTTCAGGAGTATGGACCAACTTTTTTGAGTATAGAAAACTCTATTCGAAAACCTCATTTATTTGATTATTTACAGGGGATTGAATTTCATACGCGTCTTCAACCTGGTTACTTTGGGAAAGATTCTTTCAATTATTGGTCTGGTAATTATGTAGAAACTAGACCTAGTATAGGATCTAGTAAGACAATTACTTCCCCATTTTATGGAGATAAATCTACTGAACCTGTACAAAAGCTAAGCTTTGATGGACAAAAAGTTTATCGAACTATAGCTAATACAGACGTAGCGGCTTGGCCGAATGGTAAGGTATATTTAGGTGTTACGAAAGTTGATTTTAGTCAATATGATGATCAAAAAAATGAAACTAGTACACAAACATATGATTCAAAAAGAAACAATGGCCATGTAAGTGCACAGGATTCTATTGACCAATTACCGCCAGAAACAACAGATGAACCACTTGAAAAAGCATATAGTCATCAGCTTAATTACGCGGAATGTTTCTTAATGCAGGACCGTCGTGGAACAATTCCATTTTTTACTTGGACACATAGAAGTGTAGACTTTTTTAATACAATTGATGCTGAAAAGATTACTCAACTTCCAGTAGTGAAAGCATATGCCTTGTCTTCAGGTGCTTCCATTATTGAAGGTCCAGGATTCACAGGAGGAAATTTACTATTCCTAAAAGAATCTAGTAATTCAATTGCTAAATTTAAAGTTACATTAAATTCAGCAGCCTTGTTACAACGATATCGTGTAAGAATACGCTATGCTTCTACCACTAACTTACGACTTTTTGTGCAAAATTCAAACAATGATTTTCTTGTCATCTACATTAATAAAACTATGAATAAAGATGATGATTTAACATATCAAACATTTGATCTCGCAACTACTAATTCTAATATGGGGTTCTCGGGTGATAAGAATGAACTTATAATAGGAGCAGAATCTTTCGTTTCTAATGAAAAAATCTATATAGATAAGATAGAATTTATCCCAGTACAATTGTAAGGAGATTTTAAAATGTTGGGTGATGGTCAAAATGAAAGAATAGGAAGGTGAATTTTGATGGTTAGGAAAGATTCTTTTAACAAAAGCAACATGGAAAAGTATACAGTACAAATATTAGAAATAAAATTTATTAACACAGGGGAAGATGGTAAACCAGAACCGTATGGTTATATTGACTTTTATTATCAACCTGCTCCTAACCTGAGAGAAGAAAAAGTAAGAATTTGGGAAGAGGAAAATAGTAGC

SEQ ID NO: 1419 - protein, 362 aa, Bacillus thuringiensis; identical to SEQ ID NO: 425

SEQ ID NO: 1420 - protein, 609 aa, Bacillus thuringiensis
MGTWWPTDSASDTWGEMIGFAQELVGTALSEDLKIRTNQQIDSIRIALQAYYSSLEDWLNANKPLSGPLLNQVTEEFGNALRKSRDSIAYFKSDDSNVYTIILLPAYAQVANFHLALIHEGLKYATEWNLPRLQTFGYEEDLKHYTISYVNHCEYWYQKGLDILYPRNVIGMTQWMKRNFYRLNMTINVLDIISLFSLYDSKKYPNFFEDIYNAQKELISKFQLTRIVTTEPTLHQHKYLNDSSKKICQNESSCDPIDLDEYLTLPLMFQNWLRNINFQYLAPVISVGDEALYPFFVATQNINEYMNAEGNMIIGRQQGLWNFQFIIVHLFHLVYKKMTIFMVKWLSAYPLIDEDILNGVRTPYILQKIEFYNLNKSINSKQIRPISAGTTKSPLIDIYYGLPDVNGYNLDEPQFNFNAASHYFNSIQTCYYKENTSKNHYDIYQSYVFHWEHASVKRKDEVVSDRITIFPAIKSNPILSRGIQIISHQGHTGGNVIYFTPQSELHFKINFVSNRQKYKIRLRYVAFNPVVIQYHGSNSYASLSSITLPRTSSNQNVRDLRYEEFGYSDFEINMSSAGGLEDIKIISNNEFILDRIEFIPDTLFNYLSN

SEQ ID NO: 1421 - protein, 837 aa, Bacillus thuringiensis
MKIYDIYPHYNVLSDAALITSYASDFRDSLKGLEEIWSKYATEGNRSAMTSYVSNIMQLYQTDSINYQALVKSAITLNLALTPLAPVSPFINMVIGFVRPFLFGSSKEVSMFDQIMDAVKKEMEHSFEQFTLNNLNDTINGLKTDLYDFTRLIDASTGVLQLPYESGEGCKPCKLGENSPCAPCYNDMIAINSKFQALTSSFNNALPHFKDPLANVIEKPNPGWNQEYITMCLPLYTLVATLELLTYQGYIQFAEKWRIPADSETSPITTTQIANMKANLRQRIQEHSNDIYTTFIKYLPKVNENATKGELNDYIRYHRVITLQCLDFVATWPFLDSRYYQSSGAATINFTRMTYLDIVGPVEDFYNDSKLDPSRDSGKLILSIKDINGKNDTNKISDVIAPLSLFYDNLELKSLKFNVYNSSWHCYINGYQGIYNSLSNDVSVSTNTNNLAKDLYLDFPLLNKLNMRSYAVGKASVDDSMVYVDDDSDVPSGNGHAIYGGCNGFYTGGPHSNNTLNYDNQIIQAIYEVTASNPNVYTYYYNADKTGYLATLSPIETTLSPIIGTDFQVINTVPAEQVISTSGTKFVEYITGSAVLELKPNQTAKYSILNQGLFQYKVRARVATTDSGSLSITMNNKTINLNIINTKNYTDPTTAFTNLKIQGKNGSYMVFPLSDAEHTTFDNVFNPNYGTVTMEVTNNSNTNIIIDRFEFIPYAPSKGTLLDTIPETIRTGGDSSILWKSTTGIGGQQVDLNIVIKDPSGIDVTTNYLLQYGSSYEFPLFSGQHSYPAVLNNEFTELGIDNCYGGNLGCNMNMPLKTIVPEGYTLTFSGNIYNNLK

SEQ ID NO: 1422 - protein, 1220 aa, Bacillus thuringiensis
MAILNELYPSVPYNVLAYTPPSFLPDAGTQATPADLTAYEQLLKNLEKGINAGTYSKAIADVLKGIFIDDTINYQTYVNIGLSLITLAVPEIGIFTPFIGLFFAALNKHDAPPPPNAKDIFEAMKPAIQEMIDRTLTADEQTFLNGEISGLQNLAARYQSTMDDIQSHGGFNKVDSGLIKKFTDEVLSLNSFYTDRLPVFITDNTADRTLLGLPYYAILASMHLMLLRDIITKGPTWDSKINFTPDAIDSFKTDIKNNIKLYSKTIYDVFQKGLASYGTPSDLESFAKKKKYIEIMTTHCLDFARLFPTFDPDLYPTGSGDISLQKTRRILSPFIPIRTADGLTLNNTSIDTSNWPNYENGNGAFPNPKERILKQFKLYPSWRAGQYGGLLQPYLWAIEVQDSVETRLYGQLPAVDPQAGPNYVSIDSSNPIIQINMDTWKTPPQGASGWNTNLMRGSVSGLSFLQRDGTRLSAGMGGGFADTIYSLPATHYLSYLYGTPYQTSDNYSGHVGALVGVSTPQEATLPNIIGQPDEQGNVSTMGFPFEKASYGGTVVKEWLNGANAMKLSPGQSIGIPITNVTKHNYQVRCRYASNSDNPVFFNVDTGGANPIFQQINFASTVDSNMGVKEENGVYVVKSIKTVEIPAGSFYVHVTNQGSSDLFLDRIEFVPKIQFQFCDNNNLHCDCNNPVDTDCTFCCVCTSLTDCDCNNPRGIDCTLCCQVENQLPSFVTLTDLRNITSQVNGLFAPGTQNRLAQNISDHDIEEVVLKVDALSDEIFGTNKKALRKLVNQAKRLSRARNLLIGGSFENWDAWYKGRNVVTVSDHELFKSDHVLLPPPGLSPSYIFQKVEESKLKANTRYTVSGFIAHATDLEIVVSRYGQEIKKVVQVPYGEAFPLTSSGPVCCIPHSTSNGTLGNPHFFSYSIDVGALDVDTNPGIEFGLRIVNPTGMARVSNLEIREDRPLAANEIRQVQRVARNWRTEYEKERAEVTSLIQPVINRINGLYENENWNGSIRSDISYQNIDAIVLPTLPTLRHWFMSDRFSEQGDIMAKFQGALNRAYAQLEQSTLLHNGHFTKDAANWTIEGDAHQITLEDGRRVLRLPDWSSSVSQMIEIENFNPDKEYNLVFHGQGEGTVTLEHGEETKYIETHTHHFANFTTSQRQGLTFESNKVTVTISSEDGEFLVDNIALVEAPLPTDDQNSEGNTAFSTNSDTSMNNNQ

SEQ ID NO: 1423 - protein, 3504 aa, Bacillus thuringiensis
ATGAGTCCAAATAATCAAAATGAATATGAAATTCTAGATGCTTCATCATCTACTTCTGTATCCGATAATTCTGTTAGATACCCTTTAGCAAACGATCAAACGACCACATTACAAAACATGAACTATAAAGATTATCTGAGAATGTCTGAGGGAGAGAATCCTGAATTATTTGGAAATCCGGAGACGTTTATTAGTTCATCTACGGTTCAAACTGGAATTGGCATTGTTGGTCAAGTACTGGGGGCTTTAGGGGTTCCATTTGCTGGACAGATAGCTAGTTTTTATAGTTTCATTGTCGGTCAATTATGGCCATCAAGTACCGTGAGTGTATGGGAAATGATTATGAAACAAGTGGAAGATCTAATTGATCAAAAAATAACAGATTCTGTAAGGAAAACAGCGCTTGCAGGACTACAAGGATTAGGAGATGGCTTAGACGTATATCAGAAATCACTTAAGAATTGGCTGGAAAATCGTAATGATACAAGAGCTAGAAGTGTTGTGGTGACCCAATATATAGCTTTAGAGCTTGATTTTGTTGCTAAAATCCCATCTTTTGCAATATCTGGACAGGAAGTACCATTATTATCAGTGTATGCACAAGCAGCGAATTTACATTTGCTATTATTACGAGATGCTTCCATTTTTGGAGCAGAGTGGGGATTCACACCAGGAGAAATTTCCACATTTTATGATCGTCAGGTGACACGTACCGCCCAATACTCGGATTATTGTGTAAAGTGGTATAACACTGGCTTAGATAAATTAAAAGGTACGAATGCTGCAAGTTGGCTGAAGTATCACCAATTCCGAAGAGAAATGACATTACTGGTATTAGATTTAGTAGCGTTATTTCCAAACTATGACACACGTACGTATCCAATCGAAACAACGGCCCAACTTACACGGGAAGTGTATACAGATCCAATAGTATTTAACAGAGAAACAAGTGGTGGATTTTGTAGGCGTTGGTCACTTAACAGTGATATTTCTTTTTCAGAAGTCGAAAGCGCTGTAATTCGTTCACCACACCTATTTGATATACTCAGTGAAATAGAATTTTATACAACAAGAGCGGGGCTTCCCTTGAATAATACGGAATACCTTGAATATTGGGTAGGACATTCTATAAAATATAAAAATACGAATGCCTCATCAGCATTAGAACGTAATTACGGTACGATTACTTCTAACAAAATCAAGTATTATGATTTAGCAAATAAGGATATCTTTCAGGTTCGATCATTAGGGGCGGATTTAGCTAATTACTACGCACAGGTATATGGAGTTCCGTACGCTAGTTTTACACTGCTTGACAAGAATACAGGATCAGGATCAGTTGGAGGTTTTACGTACTCAAAACCACATACAACTATGCAAGTATGTACACAAAATTACAATACGATTGATGAAATCCCTCCAGAGAATGAGCCACTTAGTAGAGGGTATAGCCATAGATTATCTCATATCACCTCTTATTCTTTTTCTAAGAATGCTAGTAGTCCTGCTAGATATGGCAATCTCCCTGTATTTGCTTGGACACATCGGAGTGCGGATGTTACAAATACAGTTTATTCAGATAAAATTACTCAGATACCAGTTGTAAAGGCACATACTTTAGTTTCAGGTACTACTGTTATTAAAGGTCCTGGATTTACAGGAGGCAATATCCTTAAAAGAACAAGTAGTGGTCCGTTAGCTTATACTAGTGTCTCTGTAAAATCACCATTATCACAAAGATATCGTGCAAGAATACGTTATGCTTCTACTACTAACTTACGACTTTTTGTAACAATTTCTGGAACTCGCATTTACTCTATAAATGTTAATAAAACCATGAATAAAGGGGATGATTTAACATTTAATACATTTGACTTAGCAACTATTGGTACTGCTTTCACATTTTCAAATTACTCGGATAGCTTAACGGTAGGTGCAGATTCTTTTGCTTCAGGAGGAGAAGTTTATGTAGATAAGTTCGAACTTATTCCGGTAAATGCAACATTTGAAGCAGAAGAAGACCTAGATGTGGCAAAGAAAGCAGTAAATGGCTTGTTTACGAGTAAAAAAGATGCCTTACAGACAAGTGTAACGGATTATCAAGTGAATCAAGCGGCAAACTTAGTAGAATGCCTATCCGATGAGTTATACCCAAATGAAAAACGAATGTTATGGGATGCAGTGAAAGAGGCGAAACGACTTGTTCAGGCACGTAACTTACTCCAAGATACAGGCTTTAATAGGATTAATGGAGAAAACGGATGGACGGGAAGTACGGGAATCGAGGTTGCGGAAGGAGATGTTCTGTTTAAAGATCGTTCGCTTCGTTTGACAAGTGCGAGAGAGATTGATACAGAAACATATCCAACGTATCTCTATCAACAAATAGATGAATCACTTTTAAAACCATATACAAGATATAAACTAAAAGGTTTTATAGGAAGTAGTCAAGATTTAGAGATTAAATTAATACGTCATCGGGCAAATCAAATCGTCAAAAATGTACCAGATAATCTCTTGCCAGATGTACTCCCTGTCAATTCTTGTGGTGGGATCGATCGCTGCAGTGAGCAACAGTATGTAGACGCGAATTTAGCACTCGAAAACAATGGAGAAAATGGAAATATGTCTTCTGATTCCCATGCATTTTCTTTCCATATTGATACAGGTGAAATAGATTTGAATGAAAATACAGGAATTTGGGTCGTATTTAAAATTCCGACAACAAATGGATACGCAACACTAGGAAATCTTGAATTGGTAGAAGAGGGGCCATTGTCAGGGGAAACATTAGAACGAGCACAACAACAAGAACAACAATGGCAAGACAAAATGGCAAGAAAACGTGGGGCATCAGAAAAAGCATATTATGCAGCAAAGCAAGCCATTGATCGTTTATTCGCAGATTATCAAGACCAAAAACTTAATTCTGGTGTAGAAATGTCAGATATGTTGGCAGCCCAAAACCTTGTACAGTCCATTCCTTACGTATATAATGATGCGTTACCAGAAATCCCTGGAATGAACTATACGAGTTTTACAGAGTTAACAAATAGACTCCAACAAGCATGGAATTTGTATGATCTTCGAAATGCTATACCAAATGGAGATTTTCGAAATGGATTAAGTGATTGGAATGCAACATCAGATGTGAATGTGCAACAACTAAGCGATACATCTGTCCTTGTCATTCCAAACTGGAATTCTCAAGTGTCACAACAATTTACAGTTCAACCGAATTATAGATATGTGTTACGTGTCACAGCGAGAAAAGAGGGAGTAGGAGACGGATATGTGATCATCCGTGATGGTGCGAATCAGACAGAAACACTCACATTTAATATATGTGATGATGATACAGGTGTTTTATCTGCTGATCAAACTAGCTATATCACAAAAACAGTGGAATTCACTCCATCTACAGAGCAAGTTTGGATTGACATGAGTGAGACCGAAGGTGTATTCAACATAGAAAGTGTAGAACTCGTGTTAGAAGAAGAGTAA

SEQ ID NO: 1424 - protein, 144 aa, Bacillus thuringiensis
MEGGNNQGFINIEGRLSLEQVLAVSAGVASYILSNLGPFGVFFSYIIGAFWPTAPSDTRVWEAFMELIEARIDQKIQESTRKDAIARLQGLGAASEVYQESLESWLENQNDARAMSVVRQQFVAFELDFVTAMPFFERSGDEIL

SEQ ID NO: 1425 - protein, 1154 aa, Bacillus thuringiensis
MNRNNQNEYEIIDGTNCGCSSDEVVKYPLTDDPNAGLQNMNYKEYLQTYDGDYTGSLINPNLSINTRDVLQTGINIVGRVLGFLGVPFAGQLVTFYTFLLNQLWPTNNNAVWEAFMAQIEELIDQRISEQVVRNALDALTGIHDYYNEYLAALEEWLERPNGARANLAFQRFENLHQLFVSQMPSFGSGPGSERDAVALLTVYAQAANLHLLLLKDAEIYGARWGLNQGQINLYFNAQQDRTQIYTNHCVATYNRGLENLRGTNTESWYNYHQFRREMTLMAMDLVALFPYYNLRQYPNGANPQLTREIYTDPVVFNPPANQGLCRRWRNNPYMTFSELENTFIRPPHLFDRLNSLTINSHRFPISSNFMDYWAGHTLRRSYMNNSAVQEDSYGATTSTRVTINTGVNGTNRIESTAVDFRSGLLGVYGVHRASFVPGGLFNGTISPANAGCRNLHDTRDELPLEENNGSPSHRLSHVTFLSFLTDQAGSIRNSGAVPLYVWARQDIDLNNTITANRITQLPLVKASEIAAGTTVVRGPGFTGGDILRRTSAGTLGTIRVNVNSPLTQRYRVRFRYASTTDFNFFVIRGGTTVNNFTFPRTMNSGQESRYESYVTREFSTSFNFLQIQDTLRLTVQSFSSGQQVYVDRIEIIPVNPTREAEEDLEAAKKAVANLFTHTRDGLQVNVTDYQVDQAANLVSCLSDEQYSHDKKMLLEAVRAAKRLSRERNLLQDPDFNEINTIEENGWKASNGVTISEGGPFFKGRALQLASARENNPTYIYQKVDASVLKPYTRYRLDGFVASSQDLELDLIHQHKVHLVKNVPDNLVSDSYSDGSCSGINRCEEQHLVDMQLDAEHHPMDCCEAAETHEFSSYIDTGDLNPSVDQGIWVVLKVRTTDGYATLGNLELVEVGPLSGESLEREQKDNAKWNAELGRKRAETDRVYQAAKQAINHLFVDYQDQQLNPEIGLAEMNEASNLLESIPGVYSDTVLQIPGVNYEIYTELSNRLQQASYLFMSRNAVQNGDFNNGLDSWNATTDATVQQDGTMHFLVLSHWDAQVSQPLRVQPNCKYVLRVTARKVGGGDGYVTIQDGAHHQETLTFNACDYDVNGTYVNDNTYITKEVVFYPETKHMWIEVSESEGAFYIDSIEFIEIQE

SEQ ID NO: 1426 - protein, 638 aa, Bacillus thuringiensis
EIIDGTNCGCSSDEVVKYPLTDDPNAGLQNMNYKEYLQTYDGDYTGSLINPNLSINTRDVLQTGINIVGRVLGFLGVPFAGQLVTFYTFLLNQLWPTNNNAVWEAFMAQIEELIDQRISEQVVRNALDALTGIHDYYNEYLAALEEWLERPNGARANLAFQRFENLHQLFVSQMPSFGSGPGSERDAVALLTVYAQAANLHLLLLKDAEIYGARWGLNQGQINLYFNAQQDRTQIYTNHCVATYNRGLENLRGTNTESWYNYHQFRREMTLMAMDLVALFPYYNLRQYPNGANPQLTREIYTDPVVFNPPANQGLCRRWRNNPYMTFSELENTFIRPPHLFDRLNSLTINSHRFPISSNFMDYWAGHTLRRSYMNNSAVQEDSYGATTSTRVTINTGVNGTNRIESTAVDFRSGLLGVYGVHRASFVPGGLFNGTISPANAGCRNLHDTRDELPLEENNGSPSHRLSHVTFLSFLTDQAGSIRNSGAVPLYVWARQDIDLNNTITANRITQLPLVKASEIAAGTTVVRGPGFTGGDILRRTSAGTLGTIRVNVNSPLTQRYRVRFRYASTTDFNFFVIRGGTTVNNFTFPRTMNSGQESRYESYVTREFSTSFNFLQIQDTLRLTVQSFSSGQQVYVD

SEQ ID NO: 1427 - protein, 249 aa, Bacillus thuringiensis
MENLNHCPLEDIKVNPWKTPQSTARVITLRVEDPNEINNLLSINEIDNPNYILQAIMLANAFQNALVPTSTDFGDALRFSMAKGLEIANTITPMGAVVSYVDQNVTQTNNQVSVMINKVLEVLKTVLGVALSGSVIDQLTAAVTNTFTNLNTQKNEAWIFWGKETANQTNYTYNVLFAIQNAQTGGVMYCVPVGFEIKVSAVKEQVLFFTIQDSASYNVNIQSLKFAQPLVSSSQYPIADLTSAINGTL

SEQ ID NO: 1428 - protein, 249 aa, Bacillus thuringiensis; identical to SEQ ID NO: 1427

SEQ ID NO: 1429 - protein, 249 aa, Bacillus thuringiensis; identical to SEQ ID NO: 520

SEQ ID NO: 1430 - protein, 250 aa, Bacillus thuringiensis
MENPNHCPLEDIQVNPWKTPQSKARVITLRIDDPNEINNLLSINEIENTNYLLQAIMLANAFQKALVPTSTEFAEDALQFSMTKGLEVANTISPPGAVVQYVDQNVSQTNNQVSAMINKVLDVLKSILGVALGQSVIEQLTSAVTNTFTNLNTQKNEAWIFWGRETSTQTNYTYNVLFAIQNGQTGGVMYCVPVGFEIKVSAVKERVLFLTIQDSASYNVNIQSLKFAQPLVSASEYPIADLTSAINGTL

SEQ ID NO: 1431 - protein, 265 aa, Bacillus thuringiensis
MKESIYYNEENEIQISQGNCFPEELGHNPWRQPQSTARVIYLKVKDPIDTTQLLEITEIENPNYVLQAIQLAAAFQDALVPTETEFGEAIRFSMPKGLEVAKTIQPKGAVVAYTDQTLSQSNNQVSVMIDRVISVLKTVMGVALSGSIITQLTAAITDTFTNLNTQKDSAWVFWGKETSHQTNYTYNVMFAIQNETTGRVMMCVPIGFEIRVFTDKRTVLFLTTKDYANYSVNIQTLRFAQPLIDSRALSINDLSEALRSSKYLY

SEQ ID NO: 1432 - protein, 525 aa, Bacillus thuringiensis
MAQSEFNQNLREQGQSRARVIILRVNNPGYNTNTLDIADIEDIIHLPQAIELANAFQSALVPTTSNFGEDTLRFDVERGLGIATHVYPRAINVNYVTRTLSQTNNQVQSMINKVIEELKSLLGINLANSVLQQLTTVITETFTNLYVQQQSAWLFWGRQTSSQTNYTYNIVFAIQNAQTGSFMKAIPIGFEISAYIARERLLFFNIQDYASYSVKIHAIQVMQPLIHESFQPLRGIFNIITSVNNRSAIQITEYYDENTHDYPVKLWDYNNIINQKWILVFNQTTRAYSIQNLIARYLVLTWDSTPGSNKVFASTNRWNDSQFWILESTADGSIFLTNMKDTQFVLEIENSSTTNGTNVIVNRKNNNAQQKFYLNKVNQEFQDGVYKIKTALNNSSVLQMSEDYFGYTSDYFVKLWTNNNNDINQKWIFEFDSTKSAYQIKSQRDPSLVLAWTWSVPTVKLPIPNNDDHLWFLQNAGSGTYYFVNMTDTRYVLEVASSSTTNGTILTINKRNGNLNQKFLLDMIN

SEQ ID NO: 1433 - protein, 259 aa, Bacillus thuringiensis
MYTKNFSNSRMEVKGNNGCSAPIIRKPFKHIVLTVPSSDLDNFNTVFYVQPQYINQALHLANAFQGAIDPLNLNFNFEKALQIANGIPNSAIVKTLNQSVIQQTVEISVMVEQLKKIIQEVLGLVINSTSFWNSVEATIKGTFTNLDTQIDEAWIFWHSLSAHNTSYYYNILFSIQNEDTGAVMAVLPLAFEVSVDVEKQKVLFFTIKDSARYEVKMKALTLVQALHSSNAPIVDIFNVNNYNLYHSNHKIIQNLNLSN

SEQ ID NO: 1434 - protein, 259 aa, Bacillus thuringiensis; identical to SEQ ID NO: 1433

SEQ ID NO: 1435 - protein, 259 aa, Bacillus thuringiensis
MYTKNFSNSRMEVKGNNGCSAPIIRKPFKHIVLTVPSSDLDNFNTVFYVQPQYINQALHLANAFQGAIDPLNLNFNFEKALQIANGIPNSAIVKTLNQSVIQQTVEISVMVEQLKKIIQEVLGLVINSTSFWNSVEATIKGTFTNLDTQIDEAWIFWHSLSAHNTSYYYNILFSIQNEDTGAVMAVLPLAFEVSVDVEKQKVLFFTIKDSARYEVKMKALTLVQALHSSDAPIVDIFNVNNYNLYHSNHKIIQNLNLSN

SEQ ID NO: 1436 - protein, 259 aa, Bacillus thuringiensis; identical to SEQ ID NO: 1433

SEQ ID NO: 1437 - protein, 263 aa, Bacillus thuringiensis
MHLNNLNNFNNLENNGEYHCSGPIIKKPFRHIALTVPSSDITNFNEIFYVEPQYIAQAIRLTNTFQGAIDPLTLNFNFEKALQIANGLPNAGVTGTINQSVIHQTIEVSVMISQIKEIIRSVLGLVINSANFWNSVVSAITNTFTNLEPQVDENWIVWRNLSATQTSYFYKILFSIQNEDTGRFMAILPIAFEITVDVQKQQLLFITIKDSARYEVKMKALTVVQALDSYNAPIIDVFNVRNYSLHRPNHNILQNLNVNPIKS

SEQ ID NO: 1438 - protein, 263 aa, Bacillus thuringiensis; identical to SEQ ID NO: 1437

SEQ ID NO: 1439 - protein, 263 aa, Bacillus thuringiensis; identical to SEQ ID NO: 1437

SEQ ID NO: 1440 - protein, 263 aa, Bacillus thuringiensis; identical to SEQ ID NO: 1437

SEQ ID NO: 1441 - protein, 246 aa, Bacillus thuringiensis
YHCSGPIIKKPFRHIALTVPSSDITNFNEIFYVEPQYIAQAIRLTNTFQGAIDPLTLNFNFEKALQIANGLPNAGVTGTINQSVIHQTIEVSVMISQIKEIIRSVLGLVINSANFWNSVVSAITNTFTNLEPQVDENWIVWRNLSATQTSYFYKILFSIQNEDTGRFMAILPIAFEITVDVQKQQLLFITIKDSARYEVKMKALTVVQALDSYNAPIIDVFNVRNYSLHRPNHNILQNLNVNPIKS

SEQ ID NO: 1442 - protein, 156 aa, Bacillus thuringiensis
NTFQGAIDPLTLNFNFEKALQIANGLPNAGVTGTINQSVIHQTIEVSVMISQIKEIIRSVLGLVINSANFWNSVVSAITNTFTNLEPQVDENWVVWRNLSATQTSYFYKILFSIQNEDTGRFMAILPIAFEITVDVQKQQLLFITIKDSARYEVKM

SEQ ID NO: 1443 - protein, 157 aa, Bacillus thuringiensis; identical to SEQ ID NO: 528

SEQ ID NO: 1444 - protein, 147 aa, Bacillus thuringiensis
MHLNNLNNFNNLENNGEYHCSGPIIKKPFRHIALTVPSSDITNFNEIFYVEPQYIAQAIRLTNTFQGAIDPLTLNFNFEKALQIANGLPNAGVTGTINQSVIHQTIEVSVMISQIKEIIRSVLGLVINSANFWNSVVSAITNTFTNL

SEQ ID NO: 1445 - protein, 263 aa, Bacillus thuringiensis; identical to SEQ ID NO: 1437

SEQ ID NO: 1446 - protein, 263 aa, Bacillus thuringiensis
MYTKNLNSLEINEDYQYSRPIIKKPFRHITLTVPSSDIASFNEIFYLEPQYVAQALRLTNTFQAAIDPLTLNFDFEKALQIANGLPNAGITGTLNQSVIQQTIEISVMISQIKEIIRNVLGLVINSTNFWNSVLAAITNTFTNLEPQVDENWIVWRNLSATHTSYYYKILFSIQNEDTGAFMAVLPIAFEITVDVQKQQLLFITIRDSARYEVKMKALTVVQLLDSYNAPIIDVFNVHNYGLYQSNHPNHHILQNLNLNKIKG

SEQ ID NO: 1447 - protein, 880 aa, Bacillus thuringiensis
MKNMKKKLASVVTCTLLAPMFLNGNVNAVYADSKTNQISTTQKNQQKEMDRKGLLGYYFKGKDFSNLTMFAPTRDSTLIYDQQTANKLLDKKQQEYQSIRWIGLIQSKETGDFTFNLSEDEQAIIEINGKIISNKGKEKQVVHLEKGKLVPIKIEYQSDTKFNIDSKTFKELKLFKIDSQNQPQQVQQDELRNPEFNKKESQEFLAKPSKINLFTQKMKREIDEDTDTDGDSIPDLWEENGYTIQNRIAVKWDDSLASKGYTKFVSNPLESHTVGDPYTDYEKAARDLDLSNAKETFNPLVAAFPSVNVSMEKVILSPNENLSNSVESHSSTNWSYTNTEGASVEAGIGPKGISFGVSVNYQHSETVAQEWGTSTGNTSQFNTASAGYLNANVRYNNVGTGAIYDVKPTTSFVLNNDTIATITAKSNSTALNISPGESYPKKGQNGIAITSMDDFNSHPITLNKKQVDNLLNNKPMMLETNQTDGVYKIKDTHGNIVTGGEWNGVIQQIKAKTASIIVDDGERVAEKRVAAKDYENPEDKTPSLTLKDALKLSYPDEIKEIEGLLYYKNKPIYESSVMTYLDENTAKEVTKQLNDTTGKFKDVSHLYDVKLTPKMNVTIKLSILYDNAESNDNSIGKWTNTNIVSGGNNGKKQYSSNNPDANLTLNTDAQEKLNKNRDYYISLYMKSEKNTQCEITIDGEIYPITTKTVNVNKDNYKRLDIIAHNIKSNPISSLHIKTNDEITLFWDDISITDVASIKPENLTDSEIKQIYSRYGIKLEDGILIDKKGGIHYGEFINEASFNIEPLQNYVTKYEVTYSSELGPNVSDTLESDKIYKDGTIKFDFTKYSKNEQGLFYDSGLNWDFKINAITYDGKEMNVFH

SEQ ID NO: 1448 - protein, 881 aa, Bacillus thuringiensis serovar entomocidus
  MISC_FEATURE (846)..(846): Xaa is Ala, Arg, Asn, Asp, Asx, Cys, Glu, Gln, Glx, Gly, His, Ile, Leu, Lys, Met, Phe, Pro, Ser, Thr, Trp, Tyr, or Val.
MKKKLASVVTCTLLAPMFLNGNVNAVYADSKTNQISTTQKNQQKEMDRKGLLGYYFKGKDFSNLTMFAPTRDSTLIYDQQTANKLLDKKQQEYQSIRWIGLIQSKETGDFTFNLSEDEQAIIEINGKIISNKGKEKQVVHLEKGKLVPIKIEYQSDTKFNIDSKTFKELKLFKIDSQNQPQQVQQDELRNPEFNKKESQEFLAKPSKINLFTQKMKREIDEDTDTDGDSIPDLWEENGYTIQNRIAVKWDDSLASKGYTKFVSNPLESHTVGDPYTDYEKAARDLDLSNAKETFNPLVAAFPSVNVSMEKVILSPNENLSNSVESHSSTNWSYTNTEGASVEAGIGPKGISFGVSVNYQHSETVAQEWGTSTGNTSQFNTASAGYLNANVRYNNVGTGAIYDVKPTTSFVLNNDTIATITAKSNSTALNISPGESYPKKGQNGIAITSMDDFNSHPITLNKKQVDNLLNNKPMMLETNQTDGVYKIKDTHGNIVTGGEWNGVIQQIKAKTASIIVDDGERVAEKRVAAKDYENPEDKTPSLTLKDALKLSYPDEIKEIEGLLYYKNKPIYESSVMTYLDENTAKEVTKQLNDTTGKFKDVSHLYDVKLTPKMNVTIKLSILYDNAESNDNSIGKWTNTNIVSGGNNGKKQYSSNNPDANLTLNTDAQEKLNKNRDYYISLYMKSEKNTQCEITIDGEIYPITTKTVNVNKDNYKRLDIIAHNIKSNPISSIHIKTNDEITLFWDDISITDVASIKPENLTDSEIKQIYSRYGIKLEDGILIDKKGGIHYGEFINEASFNIEPLQNYVTKYKVTYSSELGQNVSDTLESDKIYKDGTIKFDFTKYSXNEQGLFYDSGLNWDFKINAITYDGKEMNVFHRYNK

SEQ ID NO: 1449 - protein, 881 aa, Bacillus thuringiensis; identical to SEQ ID NO: 1448
  MISC_FEATURE (846)..(846): Xaa is Ala, Arg, Asn, Asp, Asx, Cys, Glu, Gln, Glx, Gly, His, Ile, Leu, Lys, Met, Phe, Pro, Ser, Thr, Trp, Tyr, or Val.

SEQ ID NO: 1450 - protein, 834 aa, Bacillus thuringiensis tenebrionis
MKNMKKKLASVVTCMLLAPMFLNGNVNAVNADSKINQISTTQENQQKEMDRKGLLGYYFKGKDFNNLTMFAPTRDNTLMYDQQTANALLDKKQQEYQSIRWIGLIQRKETGDFTFNLSKDEQAIIEIDGKIISNKGKEKQVVHLEKEKLVPIKIEYQSDTKFNIDSKTFKELKLFKIDSQNQSQQVQLRNPEFNKKESQEFLAKASKTNLFKQKMKRDIDEDTDTDGDSIPDLWEENGYTIQNKVAVKWDDSLASKGYTKFVSNPLDSHTVGDPYTDYEKAARDLDLSNAKETFNPLVAAFPSVNVSMEKVILSPNENLSNSVESHSSTNWSYTNTEGASIEAGGGPLGLSFGVSVTYQHSETVAQEWGTSTGNTSQFNTASAGYLNANVRYNNVGTGAIYDVKPTTSFVLNNNTIATITAKSNSTALRISPGDSYPEIGENAIAITSMDDFNSHPITLNKQQVNQLINNKPIMLETDQTDGVYKIRDTHGNIVTGGEWNGVTQQIKAKTASIIVDDGKQVAEKRVAAKDYGHPEDKTPPLTLKDTLKLSYPDEIKETNGLLYYDDKPIYESSVMTYLDENTAKEVKKQINDTTGKFKDVNHLYDVKLTPKMNFTIKMASLYDGAENNHNSLGTWYLTYNVAGGNTGKRQYRSAHSCAHVALSSEAKKKLNQNANYYLSMYMKADSTTEPTIEVAGEKSAITSKKVKLNNQNYQRVDILVKNSERNPMDKIYIRGNGTTNVYGDDVTIPEVSAINPASLSDEEIQEIFKDSTIEYGNPSFVADAVTFKNIKPLQNYVKEYEIYHKSHRYEKKTVFDIMGVHYEYSIAREQKKAA

SEQ ID NO: 1451 - protein, 769 aa, Bacillus cereus
MKNMKKKLASVVTCTLLAPMFFNGNVNTAYADNKINQDSSKQEYQQKEMDRKGLLGYYFKDKDFSNLTMFSPTRYNTLIYDQQTANKLLDKKQQEYQSIRWIGLIQSNKTGDFTFELSDDECAIIEMDGKVISNKGKEKQVVHLEKGKLVPIKIEYQLDEPLNIDDEKFKGFKLLKVDNQKQLHQVQQDELRNPEFNKKESQEFLAKASKINLFTKKIKRDIDEGTDTDGDSIPDMWEENGYTIQNRIAVKWNDSLASKGYTKFVSNPLDSHTVGDPYTDYEKASRDLDLSNAKETFNPLVAAFPSVNVSMEKVILSPNKNLSNSVESHSSTNWSYTNTEGASVEAGIGPKGFSFGVSANYQHSETVAQEWGASIGDTTQLNTASAGYLNANVRYNNVGTGAIYDVKPTTSFVLEKNTIATITAKSNSTALSISPGESYPKKGQNGIAITSMDDFNSHPITLNKKQLDQVLTNNPIMLETDQTDGIYKIKDTHGNIVTGGTWNGVTQQIKAKTASIIVDDGKQVAEKRVAAKDYAYPEDKTPSLTLKDALKLSFPEEIKETDGLLYYNNKPIYESSVMTYLDGNTAKEVKKQINDKTGEFKDVQHLYAVKLTPKMNFTIKVPVAYDTAKQAVNLGGDNPWGAKGLLGTWVNAMVVDNSGDKAYKRVEPGYLLSPTLEFSEGSLDNLKKNYSFYVSMYVKSDKPFTLRINAGPYSTKRTIEASNDFKRVDIPAFYIEGFPIDTIRLEGSDYPSAIWWKDVSITEVSAVKK

SEQ ID NO: 1452 - protein, 784 aa, Bacillus laterosporus
MTYMKKKLVSVVTCTLLAPMFLNGNVNPVYADNQTNQLSTAQENQEKEVDRKGLLGYYFKGKEFNHLTLFAPTRDNTLIYDQQTVDSLLDKKQQEYQSIRWIGLIQSKETGDFTFNLSDDKNAIMEIDTKTISHKGQNKQVVHLEKGKLVPIKIEYQPDQIVNRDSKIFKEFKLFKVDSKQQSHQVQLDELRNPEFNKKETQQFLEKASKTNLFTQNMKRDEDATDTDGDSIPDLWEENGYTIQNKVAVKWDDSFAAKGYTKFVSNPFDSHTVGDPYTDYEKAARDLDLANAKETFNPLVAAFPSVNVNLEKVILSPNEDLSNSVESHSSTNWSYTNTEGVSIEAGSGPLGISYGVSANYQHSETVAKEWGTSTGNTSQFNTASAGYLNANVRYNNVGTGAIYEVKPTTGFVLDNDTVATITAKSNSTALSISPGESYPKKGQNGIAINTMDDFNSHPITLNKQQLDQIFNNKPLMLETNQADGVYKIKDTSGNIVTGGEWNGVIQQIQAKTASIIVDTGEGVSEKRVAAKDYDNPEDKTPSLSLKEALKLGYPEEIKEKDGLLYYNDKPIYESSVMTYLDENTAKEVKEQLNDITGKFKDVKQLFDVKLTPKMNFTIKLATLYDGAEDGSSPTDVGISSPLGEWAFKPDINNVEGGNTGKRQYQLSKNKDGYYYGMLALSPEVSNKLKKNYQYYISMSIKADAGVEPTVTVMDNLNCIVDKKLKLSSNGYQRFDILVDNSESHPINVMVIDLGVSSQDYNNYSKNIYIDDITITEVSAMKVKN

SEQ ID NO: 1453 - protein, 785 aa, Brevibacillus laterosporus
MTYMKKKLVSVVTCALLAPMFLNGNVNPVYADNQTNQLSTAQENQEKEVDRKGLLGYYFKGKEFNHLTLFAPTRDNTLIYDQQTVDFLLDKKQQEYQSIRWIGLIQSKETGDFTFNLSDDKNAIIEIDGKTISHKGQNKQVVHLEKGKLVPIKIEYQSDQIVNRDSKIFKEFKLFKVDSQQQSHQVQLDELRNPEFNKKETQQFLEKASKTNIFTQNMKRDEDATDTDGDSIPDLWEENGYTIQNKVAVKWDDSFAAKGYTKFVSNPFDSHTVGDPYTDYEKAARDLDLANAKETFNPLVAAFPSVNVNLEKVILSPNEDLSNSVESHSSTNWSYTNTEGASIEAGSGPLGISYGVSANYQHSETVAKEWGTSTGNTSQFNTASAGYLNANVRYNNVGTGAIYEVKPTTGFVLDNDTVATITAKSNSTALSISPGESYPKKGQNGIAINTMDDFNSHPITLNKQQLDQIFNNKPLMLETNQADGVYKIKDTSGNIVTGGEWNGVIQQIQAKTASIIVDTGEGVSEKRVAAKDYDNPEDKTPSLSLKEALKLGYPEEIKEKDGLLYYNDKPIYESSVMTYLDENTAKEVKEQLNDITGKFKDVKQLFDVKLTPKMNFTIKLATLYDGAEDGSSPTDVGISSPLGEWAFKPDINNVEGGNTGKRQYQLSKNKDGYYYGMLALSPEVSNKLKKNYQYYISMSIKADAGVEPTVTVMDNLLNGIVDKKLKLSSNGYQRFDILVDNSESHPINVMVIDLGVSSQDYNNYSKNIYIDDITITEVSAMKVKN

SEQ ID NO: 1454 - protein, 860 aa, Bacillus thuringiensis
MTYMKKKLVSVVTCTLLAPIFLTGNVHPVNADSKKSQPSTAQEKQEKPVDRKGLLGYFFKGKEFNHLTLFAPTRDNTLIYDQQTANSLLDTKQQEYQSIRWIGLIQSKETGDFTFNLSDDQNAIIEIDGKIISHKGQNKQVVHLEKGKLVPIKIEYQSDQILTRDSNIFKEFQLFKVDSQQHSHQVQLDELRNPDFNKKETQQFLEKAAKTNLFTQNMKRDTDDDDDTDTDGDSIPDLWEENGYTIQNKVAVKWDDSFAAKGYTKFVSNPLESHTVGDPYTDYEKAARDLDLANAKETFNPLVAAFPSVNVNLEKVILSPDENLSNSVESHSSTNWSYTNTEGASIEAGGGPLGISFGVSANYQHSETVAKEWGTSTGNTSQFNTASAGYLNANVRYNNVGTGAIYEVKPTTSFVLDKDTVATITAKSNSTALSISPGESYPKKGQNGIAINTMDDFNSHPITLNKQQLDQLLNNKPLMLETNQADGVYKIKDTSGNIVTGGEWNGVIQQIQAKTASIIVDTGESVSEKRVAAKDYDNPEDKTPSLSLKEALKLGYPEEIKEKDGLLYYKDKPIYESSVMTYLDENTAKEVEKQLQDTTGIYKDINHLYDVKLTPTMNFTIKLASLYDGAENNDVKNGPIGHWYYTYNTGGGNTGKHQYRSANPSANVVLSSEAKSKLDKNTNYYLSMYMKAESDTEPTIEVSGENSTITSKKVKLNSEGYQRVDILVPNSERNPINQIYVRGNNTTNVYWDDVSITNISAINPKTLTDEEIKEIYKDFSESKDWPWFNDVTFKNIKPLENYVKQYRVDFWNTNSDRSFNRIKDSYPVNEDGSVKVNMTEYNEGYPLRIESAYHLNISDL

SEQ ID NO: 1455 - protein, 860 aa, Bacillus thuringiensis; identical to SEQ ID NO: 1454

SEQ ID NO: 1456 - protein, 775 aa, Bacillus thuringiensis serovar israelensis
MKNMKKKLASVVTCTLLAPMFLNGNVNAVYADSKTNQISTTQKNQQKEMDRKGLLGYYFKGKDFSNLTMFAPTRDNTLIYDQQTANKLLDKKQQQYQSIRWIGLIQSKEKGDFTFNLSEDEQAIIEIDGKIISNKGKEKQVVHLEKEKLVPIKIEYQSDTKFNIDSKTFKEFKLFKIDSQNQSQQVKRDELRNPEFNKKESREFLAKASKTNFFMQKMKRDIDEDTDTDGDSIPDLWEENGYTIQNKVAVKWDDKFAQQGYVKYLSSPYQAHTVGDPYTDWEKAAGDIPKSNAAATRNPLVAAFPSINVDMRKMILSKDSNLSNSAEAHSNNSYTYANSEGASIEAGFGPKGFSFGVSANYQHTETVGSDWGNSKSNTEQFNSASAGYLNANVHYNNVGTGGIYDAQPTTSFILQDSTIATITAKSNATALSIPSGDRYPASKEGISLKTMDDFNSHPITLNKPQLDAVLNNEVIKINTDQTDGRYGIIGVDGKAEIGDRWSPIIDEIKGRTASIIIDPADGKALETRIAAKDYKNPEDKTPSLTIKEGLKIAYPESISEDKDGILFYEYKNDEGKVTKKQLSEENIMPYLDEDTSKEFERQLSDGSAKGLYDIKLTPKMNITIRLATVTLGFDDQFSAYPWENATWSDKFGNLRLGSLAIPQESKYTIPKDKVKPNYDYLITGYIKHDFTTDNESLGIVAFTKKDNFEMWNMGTSIFSQNSGGEFKKFTIKTQNISGDYILDSIQLMKRNNDVNKIDSYLDDISIIPIGPNKSR

SEQ ID NO: 1457 - protein, 871 aa, Brevibacillus laterosporus
MKYMKKGLSSVVIGTLFASMFLNGNVNAVYANSKTNQIATTTQASKDNQIDREGLLGYYFKGKDFNDLTLFAPTRDNTLIYDQQTANTLVDQKHQEYHSIRWIGLIQSSATGDFTFKLSDDENAIIELDGKVISEKGNNKQSVHLEKGQLVQIKIEYQSDDALHIDNKIFKELKLFKIDSQNHSQQVQQDELRNPEFNKKETQVFLKKASKTNLFTQKTKRDIDEDTDTDGDSIPDVWEENGYTIQNKVAVKWDDSLASKGYQKFTSNPLEAHTVGDPYSDYEKAARDMPLSNAKETFNPLVAAFPSVNVSLEKVILSKNEDLSHSVESSQSTNWSYTNTEGVNVNAGWSGLGPSFGVSVNYQHSETVANEWGSATNDGTHINGAESAYLNANVRYNNVGTGAIYETKPTTSFILDGTTIGTIKAKENTTALTILPDQSYPEKGKNGIAINTMDDFNSRPIPLNKEQLNTYLSNKKPILLETDQVEGKYAIKDTNGNITIAGDWNGITDEISAKTASIIVDNGNQMSEKRVAAKDYTNPEDKTPNLSVKEALKLAYPDEIEEKDGLLFYNDQPIFEASVQSYVDEYTAKQIRKQLNDSTGSFKDVKNLYDVKLEPKMNFTIKTSTLYDGGESDNTKIGNWYYTYVVNGGNTGKKQYRSANKGAFTELSTESKNKLKKNIDYYVSLYMKADSKVSVDIEIDGKQESIVTDNITLDHVGYQRINILVPNLEGNEINTISIKGDGQTNVYWDDVSFVEVGAEEIEYKDPVPQFDIIEGDFDFFGDPLAVKYHDATYFIDSPLITQTPGTFSFTYKVIGEQTKTVLDSGSGKNANRINLDFKNVKSDRSFLYTLSCKDDLWGSTRTAVVRIFAVD

SEQ ID NO: 1458 - protein, 280 aa, Bacillus thuringiensis
MKRMEGKLFMVSKKLQVVTKTVLLSTVFSISLLNNEVIKAEQLNINSQSKYTNLQNLKITDKVEDFKEDKEKAKEWGKEKEKEWKLTATEKGKMNNFLDNKNDIKTNYKEITFSMAGSFEDEIKDLKEIDKMFDKTNLSNSIITYKNVEPTTIGFNKSLTEGNTINSDAMAQFKEQFLDRDIKFDSYLDTHLTAQQVSSKERVILKVTVPSGKGSTTPTKAGVILNNSEYKMLIDNGYMVHVDKVSKVVKKGVECLQIEGTLKKSLDFKNDINAEAHSWG

SEQ ID NO: 1459 - protein, 446 aa, Bacillus thuringiensis
MFMVSKKLQVVTKTVLLSTVFSISLLNNEVIKAEQLNINSQSKYTNLQNLKITDKVEDFKEDKEKAKEWGKEKEKEWKLTATEKGKMNNFLDNKNDIKTNYKEITFSMAGSFEDEIKDLKEIDKMFDKTNLSNSIITYKNVEPTTIGFNKSLTEGNTINSDAMAQFKEQFLDRDIKFDSYLDTHLTAQQVSSKERVILKVTVPSGKGSTTPTKAGVILNNSEYKMLIDNGYMVHVDKVSKVVKKGVECLQIEGTLKKSLDFKNDINAEAHSWGMKNYEEWAKDLTDSQREALDGYARQDYKEINNYLRNQGGSGNEKLDAQIKNISDALGKKPIPENITVYRWCGMPEFGYQISDPLPSLKDFEEQFLNTIKEDKGYMSTSLSSERLAAFGSRKIILRLQVPKGSTGAYLSAIGGFASEKEILLDKDSKYHIDKVTEVIIKVLSDM

SEQ ID NO: 1460 - protein, 446 aa, Bacillus thuringiensis; identical to SEQ ID NO: 1459

SEQ ID NO: 1461 - protein, 462 aa, Bacillus thuringiensis tenebrionis
MQRMEGKLFVVSKTLQVVTRTVLLSTVYSITLLNNVVIKADQLNINSQSKYTNLQNLKIPDNAEDFKEDKGKAKEWGKEKGEEWRPPATEKGEMNNFLDNKNDIKTNYKEITFSMAGSCEDEIKDLEEIDKIFDKANLSSSIITYKNVEPATIGFNKSLTEGNTINSDAMAQFKEQFLGKDMKFDSYLDTHLTAQQVSSKKRVILKVTVPSGKGSTTPTKAGVILNNNEYKMLIDNGYVLHVDKVSKVVKKGMECLQVEGTLKKSLDFKNDINAEAHSWGMKIYEDWAKNLTASQREALDGYARQDYKEINNYLRNQGGSGNEKLDAQLKNISDALGKKPIPENITVYRWCGMPEFGYQISDPLPSLKDFEEQFLNTIKEDKGYMSTSLSSERLAAFGSRKIILRLQVPKGSTGAYLSAIGGFASEKEILLDKDSKYHIDKATEVIIKGVKRYVVDATLLTN

SEQ ID NO: 1462 - protein, 280 aa, Bacillus thuringiensis
MKRMEGKLFMVSTKLQAVTKAVLLSTVLSISLLNNEVIKAEQLNMNSQNKYTNFENLKITDKVEDFKEDKEKAKEWGKEKEKEWKLTATEKGKMNNFLDNKNDIKTNYKEITFSMAGSFEDEIKDLKEIDKIFDKANLSSPIITYKNVEPATIGFNKSLTEGNTINSDAMAQFKEQFLDRDIKFDSYLDTHLTVQQVSSKERVILKVKVPSGKGSTTPTKAGIILNNSEYKMLIDNGYMVHVDKVSKVVKKGVECLQVEGTLKKSLDFKNDINAGAHSWG

SEQ ID NO: 1463 - protein, 457 aa, Brevibacillus laterosporus
MIVIIFTNVKGGNELKKNFYKNLICMSALLLAMPISSNVTYAYGSEKVDYLVKTTNNTEDFKEDKEKAKEWGKEKEKEWKLTVTEKTRMNNFLDNKNDIKKNYKEITFSMAGSFEDEIKDLKEIDKMFDKANLSSSIVTYKNVEPSTIGFNKPLTEGNTINTDVQAQFKEQFLGKDIKFDSYLDTHLTAQNVSSKERIILQVTVPSGKGSTIPTKAGVILNNNEYKMLIDNGYVLHVDNISKVVKKGYECLQIQGTLKKSLDFKNDINAEAHRWGMKNYEGWAKNLTDPQREALDGYARQDYKQINDYLRNQGGSGNEKLDTQIKNISEALEKQPIPENITVYRWCGMAEFGYQISDPLPSLKEMEEKFLNTMKEDKGYMSTSLSSERLSAFGSRKFILRLQVPKGSTGAYLSAIGGFASEKEILIDKDSNYHIDKITEVVIKGVKRYVVDATLLTK

SEQ ID NO: 1464 - protein, 462 aa, Bacillus thuringiensis serovar israelensis
MQRMEGKLFMVSKKLQAVTKTVLLSTVLSISLLNNEEVKAEQLNINSQNKYTNFQNLKITDNAEDFKEDKEKAKEWGEEKEKEWKLTATEKGKMNNFLDNKNDIKTNYKEITFSMAGSFEDEIKDLKEIDKIFDKANLSSSIITYKNVEPATIGFNKSLTEGNTINSDAMAQFKEQFLGKDMKFDSYLDTHLTAHQVSSKKRVILKVTVPSGKGSTTPTKAGVILTNNEYKMLIDNGYVLHVDKVSKVVKKGMECLQVEGTLKKSLDFKNDINAEAHSWGMKIYEDWAKNLTASQREALDGYARQDYKEINNYLRNQGGSGNEKLDAQIKNISDALGKKPIPENITVYRWCGMPEFGYQISDPLPSLKDFEEQFLNTIKEDKGYMSTSLSSERLAAFGSRKIILRLQVPKGSTGAYLSAIGGFASEKEILLDKDSKYHIDKATEVIIKGVKRYVVDATLLTN

SEQ ID NO: 1465 - protein, 280 aa, Bacillus thuringiensis serovar israelensis
MKRMEGKLFMVSKKLQLVTKALLFSTVLSIPLLNNEEVKAEHLNLNSQSKYPSFQNQKITDNAEDFKEDKEKAKEWGEVKEKEWKLTATEKRKINDFLNDTNKIKTNYKEITFSMAGSFEDELKDLKEIDKMFDKANLSSSIITYKNVEPATIGFNKSLTEGNTINSDVMAQFKEQFLGKDIKFDSYLDTHLTVQQVSSKERVILKVTVPSGKGSTTPTKAGVILDGNEHKMLIDNGYVLHVDKVSKVVKRGLECLQVEGTLKKSLDFKNDISAKAHSWG

SEQ ID NO: 1466 - protein, 462 aa, Bacillus thuringiensis serovar israelensis
MKRMEGKLFMVSKKLQLVTKALLFSTVLSIPLLNNEEVKAEHLNLNSQSKYPSFQNQKITDNAEDFKEDKEKAKEWGEVKEKEWKLTATEKRKINDFLNDTNKIKTNYKEITFSMAGSFEDELKDLKEIDKMFDKANLSSSIITYKNVEPATIGFNKSLTEGNTINSDVMAQFKEQFLGKDIKFDSYLDTHLTVQQVSSKERVILKVTVPSGKGSTNPTKAGVILDGNEHKMLIDNGYVLHVDKVSKVVKKGLECLQVEGTLKKSLDFKNDISAKAHSWGMKNYEEWAANLTDSQRKALDGYARQDYKKINDYLRNQGGSGNEQLDAQIKNISETLNNKPIPENITVYRWCGMPEFGYQISEPLPALKDFEWEFLNTIKEDKGYISTSLSSERLAAFGSRKIILRLQIPKGSKGAYLSAIGGFANEKEILLDKDSKYHINKITEVVIKGIKRYVVDATLLTN

SEQ ID NO: 1467 - protein, 280 aa, Bacillus thuringiensis
MKRMEGKLFMVSRKLQLVTKALLFSTVLSIPLLNNEEVKAEHLNLNSQSKYPSFQNQKITDNAEDFKEDKEKAKEWGEVKEKEWKLTATEKRKINDFLNDTNKIKTNYKEITFSMAGSFEDELKDLKEIDKMFDKANLSSSIITYKNVEPATIGFNKSLTEGNTINSDVMAQFKEQFLGKDIKFDSYLDTHLTVQQVSSKERVILKVTVPSGKGSTNPTKAGVILDGNEPKMLIDNGYVLHVDKVSKVVKKGLECLQVEGTLKKSLDFKNDISAKAHSWG

SEQ ID NO: 1468 - protein, 462 aa, Bacillus thuringiensis
MKRMEGKLFMVSKKLQLVTKALLFSTVLSIPLLNNEEVKAEHLNLNSQSKYPSFQNQKITDNAEDFKEDKEKAKEWGEVKEKEWKLTATEKRKINDFLNDTNKIKTNYKEITFSMAGSFEDELKDLKEIDKMFDKANLSSSIITYKNVEPATIGFNKSLTEGNTINSDVMAQFKEQFLGKDIKFDSYLDTHLTVQQVSSKERVILKVTVPSGKGSTTPTKAGVILDGNEHKMLIDNGYVLHVDKVSKVVKRGLECLQVEGTLKKSLDFKNDISAKAHSWGMKNYEEWAANLTDSQRKALDGYARQDYKKINDYLRNQGGSGNEQLDAQIKNISETLNNKPIPENITVYRWCGMPEFGYQISEPLPALKDFEWEFLNTIKEDKGYISTSLSSERLAAFGSRKIILRLQIPKGSKGAYLSAIGGFANEKEILLDKDSKYHINKITEVVIKGIKRYVVDATLLTN

SEQ ID NO: 1469 - protein, 451 aa, Bacillus laterosporus
MVSKKLQLITKTLVFSTVLSIPLLNNSEIKAEQLNMNSQIKYPNFQNINIADKPVDFKEDKEKAREWGKEKEKEWKLTVTEKGKINDFLDDKDGLKTKYKEINFSKNFEYETELKELEKINTMLDKANLTNSIVTYKNVEPTTIGFNQSLIEGNQINAEAQQKFKEQFLGQDIKFDSYLDMHLTEQNVSSKERVILKVTVPSGKGSTPTKAGVVLNNNEYKMLIDNGYVLHVENITKVVKKGQECLQVEGTLKKSLDFKNDSDGKGDSWGKKNYKEWSDTLTTDQRKDLNDYGVRGYTEINKYLREGDTGNTELEEKIKNISDALEKNPIPENITVYRYCGMAEFGYPIKPEAPSVQDFEERFLDTIKEEKGYMSTSLSSDATSFGARKIILRLQVPKGSSGAYVAGLDGFKPAEKEILIDKGSKYRIDKVTEVVVKGTRKLVVDATLLTK

SEQ ID NO: 1470 - protein, 350 aa, Bacillus laterosporus
MKRMEERLFMVSKKLQLITKTLVFSTVLSIPLLNNSEIKAEQLNMNSQIKYPNFQNINIADKPVDFKEDKEKAREWGKEKEKEWKLTATEKGKINDFLDDKDGLKTKYKEINFSKNFEYETELKELEKINTMLDKANLTNSIVTYKNVEPTTIGFNQSLIEGNQINAEAQQKFKEQFLGQDIKFDSYLDMHLTEQNVSSKERVILKVTVPSGKGSTPTKAGVVLNNNEYKMLIDNGYVLHVENITKVVKKGQECLQVEGTLKKSLDFKNDSDGKGDSWGKKNYKEWSDTLTTDQRKDLNDYGARGYTEINKYLREGGTGNTELEEKIKNISDALEKNPIPENITVYRYCG

SEQ ID NO: 1471 - protein, 350 aa, Bacillus thuringiensis; identical to SEQ ID NO: 1470

SEQ ID NO: 1472 - protein, 350 aa, Bacillus thuringiensis serovar israelensis; identical to SEQ ID NO: 1470

SEQ ID NO: 1473 - protein, 789 aa, Bacillus thuringiensis
MNKNNTKLSTRALPSFIDYFNGIYGFATGIKDIMNMIFKTDTGGDLTLDEILKNQQLLNDISGKLDGVNGSLNDLIAQGNLNTELSKEILKIANEQNQVLNDVNNKLDAINTMLRVYLPKITSMLSDVMKQNYALSLQIEYLSKQLQEISDKLDIINVNVLINSTLTEITPAYQRIKYVNEKFEELTFATETSSKVKKDGSPADILDELTELTELAKSVTKNDVDGFEFYLNTFHDVMVGNNLFGRSALKTASELITKENVKTSGSEVGNVYNFLIVLTALQAQAFLTLTTCRKLLGLADIDYTSIMNEHLNKEKEEFRVNILPTLSNTFSNPNYAKVKGSDEDAKMIVEAKPGHALIGFEISNDSITVLKVYEAKLKQNYQVDKDSLSEVIYGDMDKLLCPDQSEQIYYTNNIVFPNEYVITKIDFTKKMKTLRYEVTANFYDSSTGEIDLNKKKVESSEAEYRTLSANDDGVYMPLGVISETFLTPINGFGLQADENSRLITLTCKSYLRELLLATDLSNKETKLIVPPSGFISNIVENGSIEEDNLEPWKANNKNAYVDHTGGVNGTKALYVHKDGGISQFIGDKLKPKTEYVIQYTVKGKPSIHLKDENTGYIHYEDTNNNLEDYQTINKRFTTGTDLKGVYLILKSQNGDEAWGDNFIILEISPSEKLLSPELINTNNWTSTGSTNISGNTLTLYQGGRGILKQNLQLDSFSTYRVYFSVSGDANVRIRNSREVLFEKRYMSGAKDVSEMFTTKFEKDNFYIELSQGNNLYGGPIVHFYDVSIK

SEQ ID NO: 1474 - protein, 789 aa, Bacillus thuringiensis; identical to SEQ ID NO: 1473

SEQ ID NO: 1475 - protein, 746 aa, Bacillus thuringiensis
MNKNNAKLSTRALPSFIDYFNGIYGFATGIKDIMNMIFKTDTGGDLALDEILENQQLLNDISGKLDGVNGSLNDLIAQGNLNTELSKEILKIANEQNQVLNDVNNKLDAINTMLRVYLPKITSMLSDVMKQNYALSLQIEYLSKQLQEISDKLDIINVNVLINSTLTEITPAYQRIKYVNEKFEELTFATETSSKVKKDGSPADIRDELSELTELAKSVTQNDVDGFEFYLNTFHDVMVGNNLFGRSALKTASELITKENVKTSGSEVGNVYNFLIVLTALQAQAFLTLTPCRKLLGLADIDYTSIMNEHLNKEKEEFRVNILPTLSNTFSNPNYAKVKGSDEDAKMIVEAKPGHALIGFEISNDSITVLKVYEAKLKQNYQVDKDSLSEVIYGDMDKLLCPDQSGQIYYTNNIVFPNEYVITKIDFTKKMKTLRYEVTANFYDSSTGEIDLNKKKVESSEAEYRTLSANDDGVYMPLGVISETFLTPINGFGLQADENSRLITLTCKSYLRELLLATDLSNKETKLIVPPSGFISNIVENGSIEEDNLEPWKANNKNAYVDHTGGVNGTKALYVHKDGGISQFIGDKLKPKTEYVIQYTVKGKPSIHLKDENTGYIHYEDTNNNLEDYQTINKRFTTGTDLKGVYLILKSQNGDEAWGDNFIILEISPSEKLLSPELINTNNWTSTGSTNISGNTLTLYQGGRGILKQNLQLDSFSTYRVYFSVSGDANVRIRNSREVLFEKKDI

SEQ ID NO: 1476 - protein, 790 aa, Bacillus thuringiensis
MNKNNTKLSTRALPSFIDYFNGIYGFATGIKDIMNMIFKTDTGGDLTLDEILKNQQLLNDISGKLDGVNGSLNDLIAQGNLNTELSKEILKIANEQNQVLNDVNNKLDAINTMLRVYLPKITSMLSDVMKQNYALSLQIEYLSKQLQEISDKLDIINVNVLINSTLTEITPAYQRIKYVNEKFEELTFATETSSKVKKDGSPANILDELTELTELAKSVTKNDVDGFEFYLNTFHDVMVGNNLFGRSALKTASELITKENVKTSGSEVGNVYNFLIVLTALQAKAFLTLTTCRKLLGLADIDYTSIMNEHLNKEKEEFRVNILPTLSNTFSNPNYAKVKGSDEDAKMIVEAKPGHALIGFEISNDSITVLKVYEAKLKQNYQVDKDSLSEVIYGDMDKLLCPDQSEQIYYTNNIVFPNEYVITKIDFTKKMKTLRYEVTANFYDSSTGEIDLNKKKVESSEAEYKTLSANDDGVYMPLGVISETFLTPINGFGLQADENSRLITLTCKSYLRELLLATDLSNKETKLIVPPSGFISNIVENGSIEEDNLEPWKANNKNAYVDHTGGVNGTKALYVHKDGGISQFIGDNLKPKTEYVIQYTVKGKPSIHLIDENTGYIHYEDTNNNLEDYQTINKRFTTGTDLKGVYLILKSQNGDEAWGDNFIILEISPSEKLLSPELINTNNWTSTGSTNISGNTLTLYQGGRGILKQNLQLDSFSTYRVYFSVSGDANVRIRNSREVLFEKRYMSGAKDVSEMFTTKFEKDNFYIELSQGNNLYGGPIVHFYDVSIKP

SEQ ID NO: 1477 - protein, 789 aa, Bacillus thuringiensis
MNKNNTKLSTRALPSFIDYFNGIYGFATGIKDIMNMIFKTDTGGDLTLDEILKNQQLLNDISGKLDGVNGSLNDLIAQGNLNTELSKEILKIANEQNQVLNDVDNKLDAINTMLRVYLPKITSMLSDVMKQNYALSLQIEYLSKQLQEISDKLDIINVNVLINSTLTEITPAYQRIKYVNEKFEELTFATETSSKVKKDGSPADILDELTELTELAKSVTKNDVDGFEFYLNTFHDVMVGNNLFGRSALKTASELITKENVKTSGSEVGNVYNFLIVLTALQAKAFLTLTTCRKLLGLADIDYTSIMNEHLNKEKEEFRVNILPTLSNTFSNPNYAKVKGSDEDAKMIVEAKPGHALVGFEISNDSITVLKVYEAKLKQNYQVDKDSLSEVIYGDMDKLLCPDQSEQIYYTNNIVFPNEYVITKIDFTKKMKTLRYEVTANFYDSSTGEIDLNKKKVESSEAEYRTLSANDDGVYMPLGVISETFLTPINGFGLQADENSRLITLTCKSYLRELLLATDLSNKETKLIVPPSGFIKNIVENGSIEEDNLEPWKANNKNEYVDHTGGVNGTKALYVHKDGGISQFIGDKLKPKTEYVIQYTVKGKPSIHLKDENTGYIHYEDTNNNLEDYQTITKRFTTGTDLKGVYLILKSQNGDEAWGDNFIILEISPSEKLLSPELINTNNWTSTGSTNISGNTLTLYQGGRGILKQNLQLDSFSTYRVYFSVSGDANVRIRNSREVLFEKRYMSGAKDVSEIFTTKFGKDNFYIELSQGNNLNGGPIVQFPDVSIK

SEQ ID NO: 1478 - protein, 790 aa, Bacillus thuringiensis
MNKNNTKLSTRALPSFIDYFNGIYGFATGIKDIMNMIFKTDTGGDLTLDEILKNQQLLNDISGKLDGVNGSLNDLIAQGNLNTELSKEILKIANEQNQVLNDVNNKLDAINTMLRVYLPKITSMLSDVMKQNYALSLQIEYLSKQLQEISDKLDIINVNVLINSTLTEITPAYQRIKYVNEKFEELTFATETSSKVKKDGSPADILDELTELTELAKSVTKNDVDGFEFYLNTFHDVMVGNNLFGRSALKTASELITKENVKTSGSEVGNVYNFLIVLTALQAKAFLTLTTCRKLLGLADIDYTSIMNEHLNKEKEEFRVNILPTLSNTFSNPNYAKVKGSDEDAKMIVEAKPGHALIGFEISNDSITVLKVYEAKLKQNYQVDKDSLSEVIYGDMDKLLCPDQSEQIYYTNNIVFPNEYVITKIDFTKKMKTLRYEVTANFYDSSTGEIDLNKKKVESSEAEYRTLSANDDGVYMPLGVISETFLTPINGFGLQADENSRLITLTCKSYLRELLLATDLSNKETKLIVPPSGFISNIVENGSIEEDNLEPWKANNKNAYVDHTGGVNGTKALYVHKDGGISQFIGDKLKPKTEYVIQYTVKGKPSIHLKDENTGYIHYEDTNNNLEDYQTINKRFTTGTDLKGVYLILKSQNGDEAWGDNFIILEISPSEKLLSPELINTNNWTSTGSTNISGNTLTLYQGGRGILKQNLQLDSFSTYRVYFSVSGDANVRIRNSREVLFEKRYMSGAKDVSEMFTTKFEKDNFYIELSQGNNLYGGPIVHFYDVSIKP

SEQ ID NO: 1479 - protein, 789 aa, Bacillus thuringiensis
MNKNNTKLSTRALPSFIDYFNGIYGFATGIKDIMNMIFKTDTGGDLTLDEILKNQQLLNDISGKLDGVNGSLNDLIAQGNLNTELSKEILKIANEQNQVLNDVNNKLDAINTMLRVYLPKITSMLSDVMKQNYALSLQIEYLSKQLQEISDKLDIINVNVLINSTLTEITPAYQRIKYVNEKFEELTFATETSSKVKKDGSPADILDELTELTELAKSVTKNDVDGFEFYLNTFHDVMVGNNLFGRSALKTASELITKENVKTSGSEVGNVYNFLIVLTALQAKAFLTLTTCRKLLGLADIDYTSIMNEHLNKEKEEFRVNILPTLSNTFSNPNYAKVKGSDEDAKMIVEAKPGHALIGFEISNDSITVLKVYEAKLKQNYQVDKDSLSEVIYGDMDKLLCPDQSEQIYYTNNIVFPNEYVITKIDFTKKMKTLRYEVTANFYDSSTGEIDLNKKKVESSEAEYRTLSANDDGVYMPLGVISETFLTPINGFGLQADENSRLITLTCKSYLRELLLATDLSNKETKLIVPPSGFISNIVENGSIEEDNLEPWKANNKNAYVDHTGGVNGTKALYVHKDGGISQFIGDKLKPKTEYVIQYTVKGKPSIHLKDENTGYIHYEDTNNNLEDYQTINKRFTTGTDLKGVYLILKSQNGDEAWGDNFIILEISPSEKLLSPELINTNNWTSTGSTNISGNTLTLYQGGRGILKQNLQLDSFSTYRVYFSVSGDANVRIRNSREVLFEKRYMSGAKDVSEMFTTKFEKDNFYIELSQGNNLYGGPIVHFYDVSIK

SEQ ID NO: 1480 - protein, 789 aa, Bacillus thuringiensis; identical to SEQ ID NO: 1479

SEQ ID NO: 1481 - protein, 789 aa, Bacillus thuringiensis
MNKNNTKLSTRALPSFIDYFNGIYGFATGIKDIMNMIFKTDTGGDLTLDEILKNQQLLNDISGKLDGVNGSLNDLIAQGNLNTELSKEILKIANEQNQVLNDVNNKLDAINTMLRVYLPKITSMLSDVMKQNYALSLQIEYLSKQLQEISDKLDIINVNVLINSTLTEITPAYQRIKYVNEKFEELTFATETSSKVKKDGSPADILDELTELTELAKSVTKNDVDGFEFYLNTFHDVMVGNNLFGRSALKTASELITKENVKTSGSEVGNVYNFLIVLTALQAKAFLTLTTCRKLLGLADIDYTSIMNEHLNKEKEEFRVNILPTLSNTFSNPNYAKVKGSDEDAKMIVEAKPGHALIGFEISNDSITVLKVYEAKLKQNYQVDKDSLSEVIYGDMDKLLCPDQSEQIYYTNNIVFPNEYVITKIDFTKKMKTLRYEVTANFYDSSTGEIDLNKKKVESSEAEYRTLSANDDGVYMPLGVISETFLTPINGFGLQADENSRLITLTCKSYLRELLLATDLSNKETKLIVPPSGFISNIVENGSIEEDNLEPWKANNKNAYVDHTGGVNGTKALYVHKDGGISQFIGDKLKPKTEYVIQYTVKGKPSIHLKDENTGYIHYEDTNNNLEDYQTINKRFTTGTDLKGVYLILKSQNGDEAWGDNFIILEISPSEKLLSPELINTNNWTSTGSTNISGNTLTLYQGGRGILKQNLQLDSFSTYRVYFSVSGDANVRIRNSREVLFGKRYMSGAKDVSEMFTTKFEKDNFYIELSQGNNLYGGPIVHFYDVSIK

SEQ ID NO: 1482 - protein, 789 aa, Bacillus thuringiensis; identical to SEQ ID NO: 1479

SEQ ID NO: 1483 - protein, 789 aa, Bacillus thuringiensis; identical to SEQ ID NO: 1479

SEQ ID NO: 1484 - protein, 789 aa, Bacillus thuringiensis; identical to SEQ ID NO: 1479

SEQ ID NO: 1485 - protein, 789 aa, Bacillus thuringiensis
MNKNNTKLSTRALPSFIDYFNGIYGFATGIKDIMNMIFKTDTGGDLTLDEILKNQQLLNDISGKLDGVNGSLNDLIAQGNLNTELSKEILKIANEQNQVLNDVNNKLDAINTMLRVYLPKITSMLSDVMKQNYALSLQIEYLSKQLQEISDKLDIINVNVLINSTLTEITPAYQRIKYVNEKFEELTFATETSSKVKKDGSPADILDELTELTELAKSVTKNDVDGFEFYLNTFHDVMVGNNLFGRSALKTASELITKENVKTSGSEVGNVYNFLIVLTALQAKAFLTLTTCRKLLGLADIDYTSIMNEHLNKEKEEFRVNILPTLSNTFSNPNYAKVKGSDEDAKMIVEAKPGHALIGFEISNDSITVLKVYEAKLKQNYQVDKDSLSEVIYGDMDKLLCPDQSEQIYYTNNIVFPNEYVITKIDFTKKMKTLRYEVTANFYDSSTGEIDLNKKKVESSEAEHRTLSANDDGVYMPLGVISETFLTPINGFGLQADENSRLITLTCKSYLRELLLATDLSNKETKLIVPPSGFISNIVENGSIEEDNLEPWKANNKNAYVDHTGGVNGTKALYVHKDGGISQFIGDKLKPKTEYVIQYTVKGKPSIHLKDENTGYIHYEDTNNNLEDYQTINKRFTTGTDLKGVYLILKSQNGDEAWGDNFIILEISPSEKLLSPELINTNNWTSTGSTNISGNTLTLYQGGRGILKQNLQLDSFSTYRVYFSVSGDANVRIRNSREVLFEKRYMSGAKDVSEMFTTKFEKDNFYIELSQGNNLYGGPIVHFYDVSIK

SEQ ID NO: 1486 - protein, 789 aa, Bacillus thuringiensis
MNKNNTKLSTRALPSFIDYFNGIYGFATGIKDIMNMIFKTDTGGDLTLDEILKNQQLLNDISGKLDGVNGSLNDLIAQGNLNTELSKEILKIANEQNQVLNDVNNKLDAINTMLRVYLPKITSMLSDVMKQNYALSLQIEYLSKQLQEISDKLDIINVNVLINSTLTEITPAYQRIKYVNEKFEELTFATETSSKVKKDGSPADILDELTELTGLAKSVPKNDVDGFEFYLNTFHDVMVGNNLFGRSALKTASELITKENVKTSGSEVGNVYNSLIVLTLLQAKAFLTLTTCRKLLGLADIDYTSIMNEHLNKEKEEFRVNIPPTLSNTFSNPNYAKVKGSDEDAKMIVEAKPGHALVGFEISNDSITVLKVYEAKLKQNYQVDKDSLSEVIYGDMDKLLGPDQSGPIYYPNNIVFPNEYVITKIDFTKKMKTLRYEVTANFYDSSTGEIDLNKKKVESSEAEYRTLSANDDGVYMPLGVISETFLTPINGFGLQADENSRLITLTCKSYLRELLLATDLSNKETKLIVPPSGFIKNIVENGSIEEDNLEPWKANNKNAYVDHTGGVNGTKALYVHKDGGISQFIGDKLKPKTEYVIQYTVKGKPSIHLKDENTGYIHYEDTNNNLEDYQTITKRFTTGTDLKGVYLILKSQNGDEAWGDNFIILEISPSEKLLSPELINTNNWTSTGSTNISGNTLTLYQGGRGILKQNLQLDSFSTYRVYFSVSGDANVRIRNSREVLFEKRYMSGAKDVSEIFTTKLGKDNFYIELSQGNNLNGGPIVKFYDVSIK

SEQ ID NO: 1487 - protein, 789 aa, Bacillus thuringiensis; identical to SEQ ID NO: 1479

SEQ ID NO: 1488 - protein, 789 aa, Bacillus thuringiensis
MNKNNTKLSTRALPSFIDYFNGIYGFATGIKDIMNMIFKTDTGGDLTLDEILKNQQLLNDISGKLDGVNGSLNDLIAQGNLNTELSKEILKIANEQNQVLNDVNNKLDAINTMLRVYLPKLTSMLSDVMKQNYALSLQIEYLSKQLQEISDKLDIINVNVLINSTLTEITPAYQRIKYVNEKFEELTFATETSSKVKKDGSPADILDELTELTELAKSVTKNDVDGFEFYLNTFHDVMVGNNLFGRSALKTASELITKENVKTSGSEVGNVYNFLIVLTALQAKAFLTLTTCRKLLGLADIDYTSIMNEHLNKEKEEFRVNILPTLSNTFSNPNYAKVKGSDEDAKMIVEAKPGHALIGFEISNDSITVLKVYEAKLKQNYQVDKDSLSEVIYGDMDKLLCPDQSEQIYYTNNIVFPNEYVITKIDFTKKMKTLRYEVTANFYDSSTGEIDLNKKKVESSEAEYRTLSANDDGVYMPLGVISETFLTPINGFGLQADENSRLITLTCKSYLRELLLATDLSNKETKLIVPPSGFISNIVENGSIEEDNLEPWKANNKNAYVDHTGGVNGTKALYVHKDGGISQFIGDKLKPKTEYVIQYTVKGKPSIHLKDENTGYIHYEDTNNNLEDYQTINKRFTTGTDLKGVYLILKSQNGDEAWGDNFIILEISPSEKLLSPELINTNNWTSTGSTNISGNTLTLYQGGRGILKQNLQLDSFSTYRVYFSVSGDANVRIRNSREVLFEKRYMSGAKDVSEMFTTKFEKDNFYIELSQGNNLYGGPIVHFYDVSIK

SEQ ID NO: 1489 - protein, 790 aa, Bacillus thuringiensis; identical to SEQ ID NO: 1478

SEQ ID NO: 1490 - protein, 789 aa, Bacillus thuringiensis
MNKNNTKLSTRALPSFIDYFNGIYGFATGIKDIMNMIFKTDTGGDLTLDEILKNQQLLNDISGKLDGVNGSLNDLIAQGNLNTELSKEILKIANEQNQVLNDVNNKLDAINTMLRVYLPKITSMLSDVMKQNYALSLQIEYLSKQLQEISDKLDIINVNVLINSTLTEITPAYQRIKYVNEKFEELTFATETSSKVKKDGSPADILDELTELTELAKSVTKNDVDGFEFYLNTFHDVMVGNNLFGRSALKTASELITKENVKTSGSEVGNVYNFLIVLTALQAKAFLTLTTCRKLLGLADIDYTSIMNEHLNKEKEEFRVNILPTLSNTFSNPNYAKVKGSDEDAKMIVEAKPGHALIGFEISNDSITVLKVYEAKLKQNYQVDKDSLSEVIYGDMDKLLCPDQSEQIYYTNNIVFPNEYVITKIDFTKKMKTLRYEVTANFYDSSTGEIDLNKKKVESSEAEYRTLSANDDGVYMPLGVISETFLTPINGFGLQADENSRLITLTCKSYLRELLLATDLSNKETKLIVPPSGFISNIVENGSIEEDNLEPWKANNKNAYVDHTGGVNGTKALYVHKDGGISQFIGDKLKPKTEYVIQYTVKGKTSIHLKDENTGYIHYEDTNNNLEDYQTINKRFTTGTDLKGVYLILKSQNGDEAWGDNFIILEISPSEKLLSPELINTNNWTSTGSTNISGNTLTLYQGGRGILKQNLQLDSFSTYRVYFSVSGDANVRIRNSREVLFEKRYMSGAKDVSEMFTTKFEKDNFYIELSQGNNLYGGPIVHFYDVSIK

SEQ ID NO: 1491 - protein, 789 aa, Bacillus thuringiensis
MNKNNTKLNARALPSFIDYFNGIYGFATGIKDIMNMIFKTDTGGNLTLDEILKNQQLLNEISGKLDGVNGSLNDLIAQGNLNTELSKEILKIANEQNQVLNDVNNKLDAINTMLHIYLPKITSMLSDVMKQNYALSLQIEYLSKQLQEISDKLDIINVNVLINSTLTEITPAYQRIKYVNEKFEELTFATETTLKVKKDSSPADILDELTELTELAKSVTKNDVDGFEFYLNTFHDVMVGNNLFGRSALKTASELIAKENVKTSGSEVGNVYNFLIVLTALQAKAFLTLTTCRKLLGLADIDYTSIMNEHLNKEKEEFRVNILPTLSNTFSNPNYAKVKGSDEDAKMIVEAKPGYALVGFEMSNDSITVLKVYEAKLKQNYQVDKDSLSEVIYGDTDKLLCPDQSEQIYYTNNIVFPNEYVITKIDFTKKMKTLRYEVTANFYDSSTGEIDLNKKKVESSEAEYRTLSANDDGVYMPLGVISETFLTPINGFGLQADGNSRLITLTCKSYLRELLLATDLSNKETKLIVPPSGFISNIVENGSIEEDNLEPWKANNKNAYVDHTGGVNGTKALYVHKDGGFSQFIGDKLKPKTEYVIQYTVKGKPSIHLKDENTGYIHYEDTNNNLKDYQTITKRFTTGTDLKGVYLILKSQNGDEAWGDNFIILEISPSEKLLSPELINTNNWTSTGSTHISGNTLTLYQGGRGILKQNLQLDSFSTYRVYFSVSGDANVRIRNSREVLFEKRYMSGAKDVSEMFTTKFEKDNFYIELSQGNNLYGGPIVHFYDVSIK

SEQ ID NO: 1492 - protein, 789 aa, Bacillus thuringiensis; identical to SEQ ID NO: 1473

SEQ ID NO: 1493 - protein, 789 aa, Bacillus thuringiensis
MNKNNTKLSTRALPSFIDYFNGIYGFATGIKDIMNMIFKTDTGGDLTLDEILKNQQLLNDISGKLDGVNGSLNDLIAQGNLNTELSKEILKIANEQNQVLNDVNNKLDAINTMLRVYLPKITSMLSDVIKQNYALSLQIEYLSKQLQEISDKLDIINVNVLINSTLTEITPAYQRIKYVNEKFEELTFATETSSKVKKDGSPADILDELTELTELAKSVTKNDVDGFEFYLNTFHDVMVGNNLFGRSALKTASELITKENVKTSGSEVGNVYNFLIVLTALQAQAFLTLTTCRKLLGLADIDYTSIMNEHLNKEKEEFRVNILPTLSNTFSNPNYAKVKGSDEDAKMIVEAKPGHALIGFEISNDSITVLKVYEAKLKQNYQVDKDSLSEVIYGDMDKLLCPDQSEQIYYTNNIVFPNEYVITKIDFTKKMKTLRYEVTANFYDSSTGEIDLNKKKVESSEAEYRTLSANDDGVYMPLGVISETFLTPINGFGLQADENSRLITLTCKSYLRELLLATDLSNKETKLIVPPSGFISNIVENGSIEEDNLEPWKANNKNAYVDHTGGVNGTKALYVHKDGGISQFIGDKLKPKTEYVIQYTVKGKPSIHLKDENTGYIHYEDTNNNLEDYQTINKRFTTGTDLKGVYLILKSQNGDEAWGDNFIILEISPSEKLLSPELINTNNWTSTGSTNISGNTLTLYQGGRGILKQNLQLDSFSTYRVYFSVSGDANVRIRNSREVLFEKRYMSGAKDVSEMFTTKFEKDNFYIELSQGNNLYGGPIVHFYDVSIK

SEQ ID NO: 1494 - protein, 789 aa, Bacillus thuringiensis; identical to SEQ ID NO: 1479

SEQ ID NO: 1495 - protein, 789 aa, Bacillus thuringiensis
MNKNNTKLSTRALPSFIDYFNGIYGFATGIKDIMNMIFKTDTGGDLTLDEILKNQQLLNDISGKLDGVNGSLNDLIAQGNLNTELSKEILKIANEQNQVLNDVNNKLDAINTMLRVYLPKITSMLSDVMKQNYALSLQIEYLSKQLQEISDKLDIINVNVLINSTLTEITPAYQRIKYVNEKFEELTFATETSSKVKKDGSPADILDELTELTELAKSVTKNDVDGFEFYLNTFHDVMVGNNLFGRSALKTASELITKENVKTSGSEVGNVYNFLIVLTALQAKAFLTLTTCRKLLGLADIDYTSIMNEHLNKEKEEFRVNILPTLSNTFSNPNYAKVKGSDEDAKMIVEAKPGHALIGFEISNDSITVLKVYEAKLKQNYQVDKDSLSEVIYGDMDKLLCPDQSEQIYYTNNIVFPNGYVITKIDFTKKMKTLRYEVTANFYDSSTGEIDLNKKKVESSEAEYRTLSANDDGVYMPLGVISETFLTPINGFGLQADENSRLITLTCKSHLRELLLATDLSNKETKLIVPPSGFISNIVENGSIEEDNLEPWKANNKNAYVDHTGGVNGTKALYVHKDGGISQFIGDKLKPKTEYVIQYTVKGKPSIHLKDENTGYIHYEDTNNNLEDYQTINKRFTTGTDLKGVYLILKSQNGDEAWGDNFIILEISPSEKLLSPELINTNNWTSTGSTNISGNTLTLYQGGRGILKQNLQLDSFSTYRVYFSVSGDANVRIRNSREVLFEKRYMSGAKDVSEMFTTKFEKDNFYIELSQGNNLYGGPIVHFYDVSIK

SEQ ID NO: 1496 - protein, 789 aa, Bacillus thuringiensis
MNKNNTKLSTRALPGFIDYFNGIYGFATGIKDIMNMIFKTDTGGDLTLDEILKNQQLLNDISGKLDGVNGSLNDLIAQGNLNTELSKEILKIANEQNQVLNDVNNKLDAINTMLRVYLPKITSMLSDVMKQNYALSLQIEYLSKQLQEISDKLDIINVNVLINSTLTEITPAYQRIKYVNEKFEELAFATETSSKVKKDGSPADILDELTELTELAKSVTKNDVDGFEFYLNTFHDVMVGNNLFGRSALKTASELITKENVKTSGSGVGNVYNFLIVLTALQAKAFLTLTTCRKLLGLADIDYTSIMNEHLNKEKEEFRVNILPTLSNTFSNPNYAKVKGSDEDAKMIVEAKPGHALIGFEISNDSITVLKVYEAKLKQNYQVDKDSLSEVIYGDMDKLLCPDQSEQIYYTNNIVFPNEYVITKIDFTKKMKTLRYEVTANFYDSSTGEIDLNKKKVESSEAEYRTLSANDDGVYMPLGVISETFLTPINGFGLQADENSRLITLTCKSYLRELLLATDLSNKETKLIVPPSGFISNIVENGSIEEDNLEPWKANNKNAYVDHTGGVNGTKALYVHKDGGISQFIGDKLKPKTEYVIQYTVKGKPSIHLKDENTGYIHYEDTNNNLEDYQTINKRFTTGTDLKGVYLILKSQNGDEAWGDNFIILEISPSEKLLSPELINTNNWTSTGSTNISGNTLTLYQGGRGILKQNLQLDSFSTYRVYFSVSGDANVRIRNSREVLFEKRYMSGAKDVSEMFTTKFEKDNFYIELSQGNNLYGGPIVHFYDVSIK

SEQ ID NO: 1497 - protein, 789 aa, Vip3Aa24
MNKNNTKLSTRALPSFIDYFNGIYGFATGIKDIMNMIFKTDTGGDLTLDEILKNQQLLNDISGKLDGVNGSLNDLIAQGNLNTKLSKEILKIANEQNQVLNDVNNKLDAINTMLRVYLPKITSMLSDVMKQNYALSLQIKYLSKQLQEISDKLDIINVNVLINSTLTEITPAYQRIKYVNEKFEELTFATETSSKVKKDGSPADILDELTELTELAKSVTKNDVDGFEFYLNTFHDVMVGNNLFGRSALKTASELITKENVKTSGSEVGNVYNFLIVLTALQAKAFLTLTTCRKLLGLADIDYTSIMNEHLNKEKEEFRVNILPTLSNTFSNPNYAKVKGSDEDAKMIVEAKPGHALIGFEISNDSITVLKVYEAKLKQNYQADKDSLSEVIYGDMDKLLCPDQSEQIYYTNNIVFPNEYVITKIDFTKKMKTLRYEVTANFYDSSTGEIDLNKKKVESSEAEYRTLSANDDGVYMPLGVISETFLTPINGFGLQADENSRLITLTCKSYLRELLLATDLSNKETKLIVPPSGFISNIVENGSIEEDNLEPWKANNKNAYVDHTGGVNGTKALYVHKDGGISQFIGDKLKPKTEYVIQYTVKGKPSIHLKDENTGYIHYEDTNNNLEDYQTINKRFTTGTDLKGVYLILKSQNGDEAWGDNFIILEISPSEKLLSPELINTNNWTSTGSTNISGNTLTLYQGGRGILKQNLQLDSFSTYRVYFSVSGDANVRIRNSREVLFEKRYMSGAKDVSEMFTTKFEKDNFYIELSQGNNLYGGPIYHLHDVSIK

SEQ ID NO: 1498 - protein, 789 aa, Bacillus thuringiensis; identical to SEQ ID NO: 1497

SEQ ID NO: 1499 - protein, 789 aa, Bacillus thuringiensis
MNKNNTKLSTRALPSFIDYFNGIYGFATGIKDIMNMIFKTDTGGDLTLDEILKNQQLLNDISGKLDGVNGSLNDLIAQGNLNTELSKEILRIANEQNQVLNDVNNKLDAINTMLRVYLPKITSMLSDVMKQNYALSLQIEYLSKQLQEISDKLDIINVNVLINSTLTEITPAYQRIKYVNEKFEELTFATETSSKVKKDGSPADILDELTELTELAKSVTKNDVDGFEFYLNTFHDVMVGNNLFGRSALKTASELITKENVKTSGSEVGNVYNFLIVLTALQAKAFLTLTTCRKLLGLADIDYTSIMNEHLNKEKEEFRVNILPTLSNTFSNPNYAKVKGSNEDAKMIVEAKPGHALIGFEISNDSITVLKVYEAKLKQNYQVDKDSLSEVIYGDMDKLLCPDQSEQIYYTNNIVFPNEYVITKIDFTKKMKTLRYEVTANFYDSSTGEIDLNKKKVESSEAEYRTLSANDDGVYMPLGVISETFLTPINEFGLQADENSRLITLTCKSYLREPLLATDLSNKETKLIVPPSGFISNIVENGSIEEDNLEPWKANNKNAYVDHTGGVNGTKALYVHKDGGISQFIGDKLKPKTEYVIQYTVKGKPSIRLKDENTGYIHYEDTNNNLEDYQTINKRFTTGADLKGVYLILKSQNGDEAWGDNFIILEISPSEKLLSPELINTNNWTSTGSTNISGNTLTLYQGGRGILKQNLQLDSFSTYRVYFSVSGDANVRIRNSREVLFEKRYMSGAKDVSEMFTTKFEKDNFYTELSQGNNLYGGPIVHFYDVSIK

SEQ ID NO: 1500 - protein, 789 aa, Bacillus thuringiensis
MNKNNTKLSTRALPSFIDYFNGIYGFATGIKDIMNMIFKTDTGGDLTLDEILKNQQLLNDISGKLDGVNGSLNDLIAQGNLNTELSKEILKIANEQNQVLNDVNNKLDAINTMLRVYLPKITSMLSDVMKQNYALSLQIEYLSKQLQEISDKLDIINVNVLINSTLTEITPAYQRIKYVNEKFEELTFATETSSKVKKDGSPADILDELTELTELAKSVTKNGVDGFEFYLNTFHDVMVGNNLFGRSALKTASELITKENVKTSGSEVGNVYNFLIVLTALQAKAFLTLTTCRKLLGLADIDYTSIMNEHLNKEKEEFRVNILPTLSNTFSNPNYAKVKGSDEDAKMIVEAKPGHALIGFEISNDSITVLKVYEAKLKQNYQVDKDSLSEVIYGDMDELLCPDQSEQIYYTNNIVFPNEYVITKIDFTKKMKTLRYEVTANFYDSSTGEIDLNKKKVESSEAEYRTLSANDDGVYMPLGVISETFLTPINGFGLQADENSRLITLTCKSYLRELLLATDLSNKETKLIVPPSGFISNIVENGSIEEDNLEPWKANNKNAYVDHTGGVNGTKALYVHKDGGISQFIGDKLKPKTEYVIQYTVKGKPSIHLKDENTGYIHYEDTNNNLEDYQTINKRFTTGTDLKGVYLILKSQNGDEAWGDNLIILEISPSEKLLSPELINTNNWTSTGSTNISGNTLTLYQGGRGILKQNLQLDSLSTYRVYFSVSGDANVRIRNSREVLFEKRYMSGAKDVSEMFTTKFEKDNFYIELSQGNNLYGGPIVHFYDVSIK

SEQ ID NO: 1501 - protein, 789 aa, Bacillus thuringiensis
MNKNNTKLSTRALPSFIDYFNGIYGFATGIKDIMNMIFKTDTGGDLTLDEILKNQQLLNDISGKLDGVNGSLNDLIAQGNLNTELSKEILKIANEQNQVLNDVNNKLDAINTMLRVYLPKITSMLSDVMKQNYALSLQIEYLSKQLQEISDKLDIINVNVLINSTLTEITPAYQRIKYVNEKFEELTFATETSSKVKKDGSPADILDELTELTELAKSVTKNDVDGFEFYLNTFHDVMVGNNLFGHSALKTASELITKENVKTSGSEVGNVYNFLIVLTALQAKAFLTLTTCRKLLGLADIDYTSIMNEHLNKEKEEFRVNILPTLSNTFSNPNYAKVKGSDEDAKMIVEAKPGHALIGFEISNDSITVLKVYEAKLKQNYQVDKDSLSEVIYGDMDKLLCPDQSEQIYYTNNIVFPNEYVITKIDFTKKMKTLRYEVTANFYDSSTGEIDLNKKKVESSEAEYRTLSANDDGVYMPLGVISETFLTPINGFGLQADENSRLITLTCKSYLRELLLATDLSNKETKLIVPPSGFISNIVENGSIEEDNLEPWKANNKNAYVDHTGGVNGTKALYVHKDGGISQFIGDKLKPKTEYVIQYTVKGKPSIHLKDENTGYIHYEDTNNNLEDYQTINKRFTTGTDLKGVYLILKSQNGDEAWGDNFIILEISPSEKLLSPELINTNNWTSTGSTNISGNTLTLYQGGRGILKQNLQLDSFSTYRVYFSVSGDANVRIRNSREVLFEKRYMSGAKDVSEMFTTKFEKDNFYIELSQGNNLYGGPIVHFYDVSIS

SEQ ID NO: 1502 - protein, 788 aa, Bacillus thuringiensis
MNKNNTKLSNFRCLYLVEYFNGIYGFATGIKDIMNMIFKTDTGGDLTLDEILKNQQLLNDISGKLDGVNGSLNDLIAQGNLNTELSKEILKIANEQNQVLNDVNNKLDAINTMLRVYLPKITSMLSDVMKQNYALSLQIEYLSKQLQEISDKLDIINVNVLINSTLTEITPAYQRIKYVNEKFEELTFATETSSKVKKDGSPADILDELTELTELAKSVTKNDVDGFEFYLNTFHDVMVGNNLFGRSALKTASELITKENVKTSGSEVGNVYNFLIVLTALQAKAFLTLTTCRKLLGLADIDYTSIMNEHLNKEKEEFRVNILPTLSNTFSNPNYAKVKGSDEDAKMIVEAKPGHALIGFEISNDSITVLKVYEAKLKQNYQVDKDSLSEVIYGDMDKLLCPDQSEQIYYTNNIVFPNEYVITKIDFTKKMKTLRYEVTANFYDSSTGEIDLNKKKVESSEAEYRTLSANDDGVYMPLGVISETFLTPINGFGLQADENSRLITLTCKSYLRELLLATDLSNKETKLIVPPSGFISNIVENGSIEEDNLEPWKANNKNAYVDHTGGVNGTKALYVHKDGGISQFIGDKLKPKTEYVIQYTVKGKPSIHLKDENTGYIHYEDTNNNLEDYQTINKRFTTGTDLKGVYLILKSQNGDEAWGDNFIILEISPSEKLLSPELINTNNWTSTGSTNISGNTLTLYQGGRGILKQNLQLDSFSTYRVYFSVSGDANVRIRNSREVLFEKRYMSGAKDVSEMYTPKFEKDNFYIELLKAKNKNKLIALFYDVSIK

SEQ ID NO: 1503 - protein, 787 aa, Bacillus thuringiensis
MNKNNTKLSHVVVISFIDYFNGIYGFATGIKDIMNMIFKTDTGGDLTLDEILKNQQLLNDISGKLDGVNGSLNDLIAQGNLNTELSKEILKIANEQNQVLNDVNNKLDAINTMLRVYLPKITSMLSDVMKQNYALSLQIEYLSKQLQEISDKLDIINVNVLINSTLTEITPAYQRIKYVNEKFEELTFATETSSKVKKDGSPADILDELTELTELAKSVTKNDVDGFEFYLNTFHDVMVGNNLFGRSALKTASELITKENVKTSGSEVGNVYNFLIVLTALQAKAFLTLTTCRKLLGLADIDYTSIMNEHLNKEKEEFRVNILPTLSNTFSNPNYAKVKGSDEDAKMIVEAKPGHALIGFEISNDSITVLKVYEAKLKQNYQVDKDSLSEVIYGDMDKLLCPDQSEQIYYTNNIVFPNEYVITKIDFTKKMKTLRYEVTANFYDSSTGEIDLNKKKVESSEAEYRTLSANDDGVYMPLGVISETFLTPINGFGLQADENSRLITLTCKSYLRELLLATDLSNKETKLIVPPSGFISNIVENGSIEEDNLEPWKANNKNAYVDHTGGVNGTKALYVHKDGGISQFIGDKLKPETEYVIQYTVKGKPSIHLKDENTGYIPYEDTNNNLEDYQTINKRFTTGTDLKGVYLILKSQNGDEAWGDNFIILEISPSEKLLSPELINTNNWTSTGSTNISGNTLTLYQGGRGILKQNLQLDSFSTYRVYFSVSGDANVRIRNSREVLFEKRYMSGAKDVSEMFTTKFEKDNFYIEPLKGITIWVNSPFYDVSIK

SEQ ID NO: 1504 - protein, 788 aa, Bacillus thuringiensis
MNKNNTKLSNVNELSSLSDYFNGIYGFATGIKDIMNMIFKTDTGGDLTLDEILKNQQLLNDISGKLDGVNGSLNDLIAQGNLNTELSKEILKIANEQNQVLNDVNNKLDAINTMLRVYLPKITSMLSDVMKQNYALSLQIEYLSKQLQEISDKLDIINVNVLINSTLTEITPAYQRIKYVNEKFEELTFATETSSKVKKDGSPADILDELTELTELAKSVTKNDVDGFEFYLNTFHDVMVGNNLFGRSALKTASELITKENVKTSGSEVGNVYNFLIVLTALQAKAFLTLTTCRKLLGLADIDYTSIMNEHLNKEKEEFRVNILPTLSNTFSNPNYAKVKGSDEDAKMIVEAKPGHALIGFEISNDSITVLKVYEAKLKQNYQVDKDSLSEVIYGDMDKLLCPDQSEQIYYTNNIVFPNEYVITKIDFTKKMKTLRYEVTANFYDSSTGEIDLNKKKVESSEAEYRTLSANDDGVYMPLGVISETFLTPINGFGLQADENSRLITLTCKSYLRELLLATDLSNKETKLIVPPSGFISNIVENGSIEEDNLEPWKANNKNAYVDHTGGVNGTKALYVHKDGGISQFIGDKLKPKTEYVIQYTVKGKPSIHLKDENTGYIHYEDTNNNLEDYQTINKRFTTGTDLKGVYLILKSQNGDEAWGDNFIILEISPSEKLLSPELINTNNWTSTGSTNISGNTLTLYQGGRGILKQNLQLDSFSTYRVYFSVSGDANVRIRNSREVLFEKRYMSGAKDVSEMFTTKFEKDNFYIELLKGRTRIDLSPFYDVSIK

SEQ ID NO: 1505 - protein, 788 aa, Bacillus thuringiensis
MNKNNTKLSKNELSRLSDYFNGIYGFATGIKDIMNMIFKTDTGGDLTLDEILKNQQLLNDISGKLDGVNGSLNDLIAQGNLNTELSKEILKIANEQNQVLNDVNNKLDAINTMLRVYLPKITSMLSDVMKQNYALSLQIEYLSKQLQEISDKLDIINVNVLINSTLTEITPAYQRIKYVNEKFEELTFATETSSKVKKDGSPADILDELTELTELAKSVTKNDVDGFEFYLNTFHDVMVGNNLFGRSALKTASELITKENVKTSGSEVGNVYNFLIVLTALQAKAFLTLTTCRKLLGLADIDYTSIMNEHLNKEKEEFRVNILPTLSNTFSNPNYAKVKGSDEDAKMIVEAKPGHALIGFEISNDSITVLKVYEAKLKQNYQVDKDSLSEVIYGDMDKLLCPDQSEQIYYTNNIVFPNEYVITKIDFTKKMKTLRYEVTANFYDSSTGEIDLNKKKVESSEAEYRTLSANDDGVYMPLGVISETFLTPINGFGLQADENSRLITLTCKSYLRELLLATDLSNKETKLIVPPSGFISNIVENGSIEEDNLEPWKANNKNAYVDHTGGVNGTKALYVHKDGGISQFIGDKLKPKTEYVIQYTVKGKPSIHLKDENTGYIHYEDTNNNLEDYQTINKRFTTGTDLKGVYLILKSQNGDEAWGDNFIILEISPSEKLLSPELINTNNWTSTGSTNISGNTLTLYQGGRGILKQNLQLDSFSTYRVYFSVSGDANVRIRNSREVLFEKRYMSGAKDVSEMFTTKFEKDNFYIELSQGKNKNRLNGPFYDVSIK

SEQ ID NO: 1506 - protein, 789 aa, Bacillus thuringiensis; identical to SEQ ID NO: 1479

SEQ ID NO: 1507 - protein, 789 aa, Bacillus thuringiensis; identical to SEQ ID NO: 1479

SEQ ID NO: 1508 - protein, 789 aa, Bacillus thuringiensis
MNKNNTKLSTRALPSFIDYFNGIYGFATGIKDIMNMIFKTDTGGDLTLDEILKNQQLLNDISGKLDGVNGSLNDLIAQGNLNTELSKEILKIANEQNQVLNDVNNKLDAINTMLRVYLPKITSMLSDVMKQNYALSLQIEYLSKQLQEISDKLDIINVNVLINSTLTEITPAYQRIKYVNEKFEELTFATETSSKVKKDGSPADILDELTELTELAKSVTKNDVDGFEFYLNTFHDVMVGNNLFGRSALKTASELITKENVKTSGSEVGNVYNFLIVLTALQAKAFLTLTTCRKLLGLADIDYTSIMNEHLNKEKEEFRVNILPTLSNTFSNPNYAKVKGSDEDAKMIVEAKPGHALVGFEISNDSITVLKVYEAKLKQNYQVDKDSLSEVIYGDMDKLLCPDQSEQIYYTNNIVFPNEYVITKIDFTKKMKTLRYEVTANFYDSSTGEIDLNKKKVESSEAEYRTLSANDDGVYMPLGVISETFLTPINGFGLQADENSRLITLTCKSYLRELLLATDLSNKETKLIVPPSGFIKNIVENGSIEEDNLEPWKANNKNAYVDHTGGVNGTKALYVHKDGGISQFIGDKLKPKTEYVIQYTVKGKPSIHLKDENTGYIHYEDTNNNLEDYQTITKRFTTGTDLKGVYLILKSQNGDEAWGDNFIILEISPSEKLLSPELINTNNWTSTGSTNISGNTLTLYQGGRGILKQNLQLDSFSTYRVYFSVSGDANVRIRNSREVLFEKRYMSGAKDVSEIFTTKLGKDNFYIELSQGNNLNGGPIVKFSDVSIK

SEQ ID NO: 1509 - protein, 789 aa, Bacillus thuringiensis; identical to SEQ ID NO: 1479

SEQ ID NO: 1510 - protein, 789 aa, Bacillus thuringiensis; identical to SEQ ID NO: 1479

SEQ ID NO: 1511 - protein, 789 aa, Bacillus thuringiensis
MNMNNTKLNARALPSFIDYFNGIYGFATGIKDIMNMIFKTDTGGDLTLDEILKNQQLLNDISGKLDGVNGSLNDLIAQGNLNTELSKEILKIANEQNQVLNDVNNKLDAINTMLRVYLPKITSMLSDVMKQNYALSLQIEYLSKQLQEISDKLDIINVNVLINSTLTEITPAYQRIKYVNEKFEELTFATETSSKVKKDGSPADILDELTELTELAKSVTKNDVDGFEFYLNTFHDVMVGNNLFGRSALKTASELITKENVKTSGSEVGNVYNFLIVLTALQAKAFLTLTTCRKLLGLADIDYTSIMNEHLNKEKEEFRVNILPTLSNTFSNPNYAKVKGSDEDAKMIVEAKPGHALVGFEVSNDSITVLKVYEAKLKQNYQVDKDFLSEVIYGDMDKLLCPDQSEQIYYTNNIVFPNEYVITKIDFTKKMKTLRYEVTANFYDSSTGEIDLNKKKVESSEAEYRTLSANDDGVYMPLGVISETFLTPINGFGLQADENSRLITLTCKSYLRELLLATDLSNKETKLIVPPSGFISNIVENGSIEEDNLEPWKANNKNAYVDHTGGVNGTKALYVHKDGGISQFIGDKLKPKTEYVIQYTVKGKPSIHLKDENTGYIHYEDTNNNLEDYQTITKRFTTGTDLKGVYLILKSQNGDEAWGDNFIILEISPSEKLLSPELINTNNWTSTGSTNISGNTLTLYQGGRGILKQNLQLDSFSTYRVYFSVSGDANVRIRNSREVLFEKRYMSGAKDVSEMFTTKFEKDNFYIELSQGNNLYGGPIVHFYDVSIK

SEQ ID NO: 1512 - protein, 789 aa, Bacillus thuringiensis
MNMNNTKLNARALPSFIDYFNGIYGFATGIKDIMNMIFKTDTGGNLTLDEILKNQQLLNEISGKLDGVNGSLNDLIAQGNLNTELSKEILKIANEQNQVLNDVNNKLDAINTMLHIYLPKITSMLSDVMKQNYALSLQIEYLSKQLQEISDKLDIINVNVLINSTLTEITPAYQRIKYVNEKFEELTFATETTLKVKKDSSPADILDELTELTELAKSVTKNDVDGFEFYLNTFHDVMVGNNLFGRSALKTASELIAKENVKTSGSEVGNVYNFLIVLTALQAKAFLTLTTCRKLLGLADIDYTSIMNEHLNKEKEEFRVNILPTLSNTFSNPNYAKVKGSDEDAKMIVEAKPGHALVGFEMSNDSITVLKVYEAKLKQNYQVDKDSLSEVIYGDMDKLLCPDQSEQIYYTNNIVFPNEYVITKIDFTKKMKTLRYEVTANSYDSSTGEIDLNKKKVESSEAEYRTLSAKDDGVYMPLGVISETFLTPINGFGLQADENSRLITLTCKSYLRELLLATDLSNKETKLIVPPSGFISNIVENGNLEGENLEPWIANNKNAYVDHTGGVNGTRALYVHKDGGFSQFIGDKLKPKTEYVIQYTVKGKPSIHLKNENTGYIHYEDTNNNLEDYQTITKRFTTGTDLKGVYLILKSQNGDEAWGDNFTILEISPSEKLLSPELINVNNWIRTGSTHISGNTLTLYQGGGGNLKQNLQLDSFSTYRVNFSVTGDANVRIRNSREVLFEKRYMSGAKDVSEIFTTKLGKDNFYIELSQGNNLYGGPLVKFNDVSIK

SEQ ID NO: 1513 - protein, 789 aa, Bacillus thuringiensis
MNKNNTKLSARALPSFIDYFNGIYGFATGIKDIMNMIFKTDTGGNLTLDEILKNQQLLNEISGKLDGVNGSLNDLIAQGNLNTELSKEILKIANEQNQVLNDVNNKLDAINTMLHIYLPKITSMLSDVMKQNYALSLQIEYLSKQLQEISDKLDIINVNVLINSTLTEITPAYQRIKYVNEKFEELTFATETTLKVKKDSSPADILDELTELTELAKSVTKNDVDGFEFYLNTFHDVMVGNNLFGRSALKTASELIAKENVKTSGSEVGNVYNFLIVLTALQAKAFLTLTTCRKLLGLADIDYTSIMNEHLNKEKEEFRVNILPTLSNTFSNPNYAKVKGSDEDAKMIVEAKPGHALVGFEMSNDSITVLKVYEAKLKQNYQVDKDSLSEVIYGDMDKLLCPDQSEQIYYTNNIVFPNEYVITKIDFTKKMKTLRYEVTANSYDSSTGEIDLNKKKVESSEAEYRTLSAKDDGVYMPLGVISETFLTPINGFGLQADENSRLITLTCKSYLRELLLATDLSNKETKLIVPPSGFISNIVENGNLEGENLEPWIANNKNAYVDHTGGVNGTRALYVHKDGGFSQFIGDKLKPKTEYVIQYTVKGKPSIHLKNENTGYIHYEDTNNNLEDYQTITKRFTTGTDLKGVYLILKSQNGDEAWGDNFTILEISPSEKLLSPELINVNNWIRTGSTHISGNTLTLYQGGGGNLKQNLQLDSFSTYRVNFSVTGDANVRIRNSREVLFEKRYMSGAKDVSEIFTTKLGKDNFYIELSQGNNLYGGPLVHFYDVSIK

SEQ ID NO: 1514 - protein, 789 aa, Bacillus thuringiensis
MNMNNTKLSARALPSLIDYFNGIYGFATGIKDIMNMIFKTDTGGNLTLDEILKNQQLLNEISGKLDGVNGSLNDLIAQGNLNTELSKEILKIANEQNQVLNDVNNKLDAINTMLHIYLPKITSMLSDVMKQNYALSLQIEYLSKQLQEISDKLDIINVNVLINSTLTEITPAYQRIKYVNEKFEELTFATETTLKVKKDSSPADILDELTELTELAKSVTKNDVDGFEFYLNTFHDVMVGNNLLGRSALKTASELIAKENVKTSGSEVGNVYNFLIVLTALQAKAFLTLTTCRKLLGLADIDYTSIMNEHLNKEKEEFRVNILPTLSNTFSNPNYAKVKGSDEDAKMIVEAKPGHALVGFEMSNDSITVLKVYEAKLKQNYQVDKDSLSEVIYGDMDKLLCPDQSEQIYYTNNIVFPNEYVITKIDFTKKMKTLRYEVTANSYDSSTGEIDLNKKKVESSEAEYRTLSAKDDGVYMPLGVISETFLTPINGFGLQADENSRLITLTCKSYLRELLLATDLSNKETKLIVPPSGFISNIVENGNLEGENLEPWIANNKNAYVDHTGGVNGTRALYVHKDGGFSQSIGDKLKPKTEYVIQYTVKGKPSIHLKNENTGYIHYEDTNNNLEDYQTITKRFTTGTDLKGVYLILKSQNGDEAWGDNFTILEISPSEKLLSPELINVNNWIRTGSTHISGYTLTLYQGGGGNLKQNLQLDSFSTYRVNFSVTGDANVRIRNSREVLFEKRYMSGAKDVSEIFTTKLGKDNFYIELSQGNNLYGGPLVHFYDVSIK

SEQ ID NO: 1515 - protein, 789 aa, Bacillus thuringiensis
MNKNNTKLSTRALPSFIDYFNGIYGFATGIKDIMNMIFKTDTGGDLTLDEILKNQQLLNDISGKLDGVNGSLNDLIAQGNLNTELSKEILKIANEQNQVLNDVNNKLDAINTMLRVYLPKITSMLSDVMKQNYALSLQIEYLSKQLQEISDKLDIINVNVLINSTLTEITPAYQRIKYVNEKFEELTFATETSSKVKKDGSPADILDELTELTELAKSVTKNDVDGFEFYLNTFHDVMVGNNLFGRSALKTASELITKENVKTSGSEVGNVYNFLIVLTALQAKAFLTLTTCRKLLGLADIDYTSIMNEHLNKEKEEFRVNILPTLSNTFSNPNYAKVKGSDEDAKMIVEAKPGHALVGFEISNDSITVLKVYEAKLKQNYQVDKDSLSEVIYGDMDKLLCPDQSEQIYYTNNIVFPNEYVITKIDFTKKMKTLRYEVTANFYDSSTGEIDLNKKKVESSEAEYRTLSANDDGVYMPLGVISEAFLTPINGFGLQADENSRLITLTCKSYLRELLLATDLSNKETKLIVPPSGFIKNIVENGSIEEDNLEPWKANNKNAYVDHTGGVNGTKALYVHKDGGISQFIGDKLKPKTEYVIQYTVKGKPSIHLKDENTGYIHYEDTNNNLEDYQTITKRFTTGTDLKGVYLILKSQNGDEAWEDNFIILEISPSEKLLSPELINTNNWTSTGSTNISGNTLTLYQGGRGILKQNLQLDSFSTYRVYFSVSGDANVRIRNSREVLFEKRYMSGAKDVSEIFTTKLGKDNFYIELSQGNNLNGGPIVKFSDVSIK

SEQ ID NO: 1516 - protein, 789 aa, Bacillus thuringiensis; identical to SEQ ID NO: 1479

SEQ ID NO: 1517 - protein, 789 aa, Bacillus thuringiensis; identical to SEQ ID NO: 1479

SEQ ID NO: 1518 - protein, 789 aa, Bacillus thuringiensis
MNKNNTKLSTRALPSFIDYFNGIYGFATGIKDIINMIFKTDTGGDLTLDEILKNQQLLNDISGKLDGVNGSLNDLIAQGNLNTELSKEILKIANEQNQVLNDVNNKLDAINTMLRVYLPKITSMLSDVMKQNYALSLQIEYLSKQLQEISDKLDIINVNVLINSTLTEITPAYQRIKYVNEKFEELTFATETSSKVKKDGSPADILDELTELTELAKSVTKNDVDGFEFYLNTFHDVMVGNNLFGRSALKTASELITKENVKTSGSEVGNVYNFLIVLTALQAKAFLTLTTCRKLLGLADIDYTSIMNEHLNKEKEEFRVNILPTLSNTFSNPNYAKVKGSDEDAKMIVEAKPGHALIGFEISNDSITVLKVYEAKLKQNYQVDKDSLSEVIYGDMDKLLCPDQSEQIYYTNNIVFPNEYVITKIDFTKKMKTLRYEVTANFYDSSTGEIDLNKKKVESSEAEYRTLSANDDGVYMPLGVISETFLTPINGFGLQADENSRLITLTCKSYLRELLLATDLSNKETKLIVPPSGFISNIVENGSIEEDNLEPWKANNKNAYVDHTGGVNGTKALYVHKDGGISQFIGDKLKPKTEYVIQYTVKGKPSIHLKDENTGYIHYEDTNNNLEDYQTINKRFTTGTDLKGVYLILKSQNGDEAWGDNFIILEISPSEKLLSPELINTNNWTSTGSTNISGNTLTLYQGGRGILKQNLQLDSFSTYRVYFSVSGDANVRIRNSREVLFEKRYMSGAKDVSEMFTTKFEKDNFYIELSQGNNLYGGPIVHFYDVSIK

SEQ ID NO: 1519 - protein, 789 aa, Bacillus thuringiensis; identical to SEQ ID NO: 1518

SEQ ID NO: 1520 - protein, 788 aa, Bacillus thuringiensis
MNKNNTKLSTRALPSFIDYFNGVYGFATGIKDIMNMIFKTDTGGDLTLDEILKNQQLLNDISGKLDGVNGSLNDLIAQGNLNTELSKEILKIANEQNQVLNDVNNKLDAINTMLRVYPPKITSMLSDVMKQNYALSLQIEYLSKQLQEISDKLDIINVNVLINSTLTEITPAYQRIKYVNEKFEELTFATETSSKVKRDGSPADILDELTELTELAKSVTKNDVDGFEFYLNTFHDVMVGNNLFGRSALKTASELITKENVKTSGSEVGNVYNFLIVLTALQAKAFLTLTTCRKLLGLADIDYTSIMNEHLNKEKEEFRVNILPTLSNTFSNPNYAKVKGSDEDAKMIVEAKPGHALIGFEISNDSITVLKVYEAKLKQNYQVDKDSLSEVIYGDMDKLLCPDQSEQIYYTNNIVFPNEYVITKIDFTKKMKTLRYEVTANLYDSSTGEIDLNKKKVESSEAEYRTLSANDDGVYMPLGVISETFLTPINGFGLQADENSRLITLTCKSYLRELLLATDLSNKETKLIVPPSGFISNIVENGSIEEDNLEPWKANNKNAYVDHTGGVNGTKALYVHKDGGISQFIGDKLKPKTKYVIQYTVKGKPSIHLKDENTGYIHYEDTNNNLEDYQTINKRFTTGTDLKGVYLILKSQNGDEAWGDNFIILEISPSEKLLSPELINTNNWTSTGSTNISGNTLTLYQGGRGILKQNLQLDSFSTYRVYFSVSGDANVRIRNSREVLFEKRYMSGAKDVSEMFTTKFEKDNFYIELSQGNNLYGGPIVHFYDVSI

SEQ ID NO: 1521 - protein, 788 aa, Bacillus thuringiensis; identical to SEQ ID NO: 1520

SEQ ID NO: 1522 - protein, 788 aa, Bacillus thuringiensis
MNKNNTKLSTRALPSFIDYFNGIYGFATGIKDIMNMIFKTDTGGDLTLDEILKNQQLLNDISGKLDGVNGSLNDLIAQGNLNTELSKEILKIANEQNQVLNDVNNKLDAINTMLRVYLPKITSMLSDVMKQNYALSLQIEYLSKQLQEISDKLDIINVNVLINSTLTEITPAYQRIKYVNEKFEELTFATETSSKVKKDGSPADILDELTELTELAKSVTKNDVDGFEFYLNTFHDVRVGNNLFGRSALKTASELITKENVKTSGSEVGNVYNFLIVLTALQAKAFLTLTTCRKLLGLADIDYTSIMNEHLSKEKEEFRVNILPTLSNTFSNPNYAKVKGSDEDAKMIVEAKPGHALIGFEISNDSITVLKVYEAKLKQNYQVDKDSLSEVIYGDMDKLLCPDQSEQIYYTNNIVFPNEYVITKIDFTKKMKTLRYEVTANFYDSSTGEIDLNKKKVESSEAEYRTLSANDDGVYMPLGVISETFLTPINGFGLQADENSRLITLTCKSYLRELLLATDLSNKETKLIVPPSGFISNIVENGSIEEDNLEPWKANNKNAYVDHTGGVNGTKALYVHKDGGISQFIGDKLKPKTEYVTQYTVKGKPSIHLKDENTGYIHYEDTNNNLEDYQTINKRFTTGTDLKGVYLILKSQNGDEAWGDNFIILEISPSEKSLSPELINTNNWTSTGSTNISGNTLTLYQGGRGILKQNLQLDSFSTYRVYFSVSGDANVRIRNSREVLFEKRYMSGAKDVSEMFTTKFEKDNFYIELSQGNNLYGGPIVHFYDVSI

SEQ ID NO: 1523 - protein, 788 aa, Bacillus thuringiensis; identical to SEQ ID NO: 1522

SEQ ID NO: 1524 - protein, 787 aa, Bacillus thuringiensis
MNMNNTKLNARALPSFIDYFNGIYGFATGIKDIMNMIFKTDTGGNLTLDEILKNQQLLNEISGKLDGVNGSLNDLIAQGNLNTELSKEILKIANEQNQVLNDVNNKLDAINTMLHIYLPKITSMLSDVMKQNYALSLQVEYLSKQLKEISDKLDVINVNVLINSTLTEITPAYQRIKYVNEKFEELTFATETTLKVKKDSSPADILDELTELTELAKSVTKNDVDGFEFYLNTFHDVMVGNNLFGRSALKTASELIAKENVKTSGSEVGNVYNFLIVLTALQAKAFLTLTTCRKLLGLADIDYTSIMNEHLNKEKEEFRVNILPTLSNTFSNPNYAKVKGSDEDAKMIVEAKPGHALVGFEISNDSMTVLKVYEAKLKQNYQVDKDSLSEVIYSDMDKLLCPDQSEQIYYTNNIVFPNEYVITKIDFTKKMKTLRYEVTANSYDSSTGEIDLNKKKVESSEAEYRTLSANNDGVYMPLGVISETFLTPINGFGLQADENSRLITLTCKSYLRELLLATDLSNKETKLIVPPISFISNIVENGNLEGENLEPWIANNKNAYVDHTGGINGTKVLYVHKDGEFSQFVGGKLKSKTEYVIQYIVKGKASIYLKDKKNENSIYEEINNDLEGFQTVTKRFITGTDSSGIHLIFTSQNGEGAFGGNFIISEIRTSEELLSPELIMSDAWVGSQGTWISGNSLTINSNVNGTFRQNLPLESYSTYSMNFTVNGFGKVTVRNSREVLFEKSYPQLSPKDISEKFTTAANNTGLYVELSRSTSGGAINFRDFSIK

SEQ ID NO: 1525 - protein, 787 aa, Bacillus thuringiensis; identical to SEQ ID NO: 1524

SEQ ID NO: 1526 - protein, 787 aa, Bacillus thuringiensis; identical to SEQ ID NO: 1524

SEQ ID NO: 1527 - protein, 786 aa, Bacillus thuringiensis
MQKNNKLSVKALPSFIDYFNGIYGFATGIKDIMNMIFKTNTGGDLTLDEILKNQQLLNEISGKLDGVNGSLNDLLAQGNLDTELSKEILKIANEQNKVLNDVNTKLDAINLMLNTYLPKITSMLSDVMKQNYALGLQIEYLSKQLKEISDKLDVINVNVLINSTLTEITPAYQRIKYVNEKFEALTSATETNLKTKQDSSHTDILDELTELTELAKSVTKNDVDGFEFYLNTFHDVMIGNNLFGRSALKTASELIAKENLKTSGSEVGNVYNFLIVLTALQAKAFLTLTTCRKLLGLADIDYTPIMNEHLNKEKEEFRVNILPTLSNTFSNPNYEKARGSDKDAKIIMEAKPGYALVGFEISKDSIAVLKVYQAKLKHNYQIDKDSLSEIVYGDIDKLLCPDQSEQMYYTNKIAFPNEYVITKIAFTKKLNSLRYEVTANFYDSSTGDIDLNKKKIESSEAEFSMLNANNDGVYMPIGTISETFLTPINGFGLVVDENSRLVTLTCKSYLRETLLATDLSNKETKLIVPPNGFISNIVENGNLEGENLEPWKANNKNAYVDHTGGVNGTKVLYVHEDGEFSQFIGDKLKLKTEYVIQYIVKGKAAIYLKDEKNGDYIYEETNNELEDFQAVTKRFITGTDSSRVHLIFTSQNGEEAFGGNFIISEIRPSEELLSPELIKSDAWVGSQGTWISGNSLNINSNVNGTFRQNLSLESYSTYSMNFNVNGFGKVTIRNSREVVFERSYLQFSSKYISEKFTTTTNNTGLYVELSRASSRGVINFGDFSIK

SEQ ID NO: 1528 - protein, 786 aa, Bacillus thuringiensis
MNMNNTKLNARALPSFIDYFNGIYGFATGIKDIMNMIFKTDTGGNLTLDEILKNQQLLNEISGKLDGVNGSLNDLIAQGNLNTELAKQILKVANEQNQVLNDVNNKLDAINSMLKIYLPKITSMLSDVMKQNYVLSLQIEYLSKQLQEISDKLDIINVNVLINSTLTEITPAYQRIKYVNEKFDDLTFATENTLKVKKDSSPADILDELTELTELAKSVTKNDVDGFEFYLNTFHDVMVGNNLFGRSALKTASELIAKENVKTSGSEVGNVYNFLIVLTALQAKAFLTLTTCRKLLGLADIDYTSIMNEHLNKEKEEFRVNILPTLSNTFSNPNYAKAKGSNEDTKMIVEAKPGYVLVGFEMSNNSITVLKAYQAKLKKDYQIDKDSLSEIIYSDTDKLLCPDQSEQIYYTKNIAFPNEYVITKIAFTKKMNSLRYEATANFYDSSTGDIDLNKTKVESSEAEYSMLKASDDEVYMPLGLISETFLNPINGFRLAVDENSRLVTLTCRSYLRETLLATDLNNKETKLIVPPNVFISNIVENGNIEMDTLEPWKANNENANVDYSGGVNGTRALYVHKDGEFSHFIGDKLKSKTEYLIRYIVKGKASIFLKDEKNENYIYEDTNNNLEDYQTITKRFTTGTDSTGVYLIFNSQNGDEAWGDNFIILEISPCEKLLSPELIKTDKWISTGSTYISDDRLTLYQGGRGILKQNLQLDRFSTYRVNFSVNGDANVRIRNSREVLLEKRYLNRKGVSEMFTTKFDKDNFYVELSQGDNLGTVVHFYDFSIK

SEQ ID NO: 1529 - protein, 786 aa, Bacillus thuringiensis
MNMNNAKLNARALPSFIDYFNGIYGFATGIKDIMNMIFKTDTGSNLTLDEILKNQQLLNEISGKLDGVNGSLNDLIAQGNLNTELAKQILKVANEQNQVLNDVNNKLDAINSMLKIYLPKITSMLSDVMKQNYVLSLQIEYLSKQLQEISDKLDIINVNVLINSTLTEITPAYQRMKYVNEKFEELTFATETTLKVKKDSPPADILDELTELTELAKSVTKNDVDGFEFYLNTFHDVMVGNNLFGRSALKTASELIAKENVKTSGSEVGNVYNFLIVLTALQAKAFLTLTTCRKLLGLADIDYTSIMNEHLNKEKEEFRVNILPTLSNTFSNPNYAKAKGSNEDTKMIVEAKPGYVLVGFEMSNDSITVLKAYQAKLKKDYQIDKDSLSEIIYSDTDKLLCPDQSEQIYYTKNIAFPNEYVITKIAFTKKMNSLRYEATANFYDSSTGDIDLNKTKVESSEAEYSMLKASDDEVYMPLGLISETFLNPINGFRLAVDENSRLVTLTCRSYLRETLLATDLNNKETKLIVPPNVFISNIVENGNIEMDTLEPWKANNENANVDYSGGVNGTRALYVHKDGEFSHFIGDKLKSKTEYLIRYIVKGKASIFLKDEKNENYIYEDTNNNLEDYQTITKRFTTGTDSTGVYLIFNSQNGDEAWGDNFIILEISPCEKLLSPELIKTDKWNSTGSTYISDDRLTLYRGGRGILKQNLQLDGFSTYRVNFSVDGDANVRIRNSREVLLEKRYLNRKGVSEMFTTKFDKDNFYVELSQGDNLGTIVHFYDFSIK

SEQ ID NO: 1530 - protein, 787 aa, Bacillus thuringiensis
MNMNNTKLNARALPSFIDYFNGIYGFATGIKDIMNMIFKTDTGGNLTLDEILKNQQLLNEISGKLDGVNGSLNDLIAQGNLNTELSKEILKIANEQNQVLNDVNNKLDAINTMLHIYLPKITSMLSDVMKQNYALSLQIEYLSKQLQEISDKLDIINVNVLINSTLTEITPAYQRIKYVNEKFEELTFATETTLKVKEDGSPADILDELTELTELAKSVTKNEVDGFEFYLNTFHDVMVGNNLFGRSALKTASELIAKENVKTSGSEVGNVYNFLIVLTALQAKAFLTLTTCRKLLGLADIDYTSIMNEHLNKEKEEFRVNILPTLSNTFSNPNYVKAKGSDRDAKMIVEAKPGYALVGFEMSNDSMTVLKAYQAKLKQDYQVDKDSLSEIVYGDMNKLLCPDQSEQIYYTNNIAFPREYVITKLTFTKKMNSLRYEATANFYDSSTGDMDLNKTKVESSEAEYSRLSASNDGVYMPLGLISETFLTPINGFGLVVDENSRLVTLTCKSYLREILLATDLSNKETKLIVPPNGFISNIVENGNLEGENLEPWKANNKNAYIDHTGGVKGTKVLYVHKDGEFSQFIGYKLKSKTEYVIQYIVKGKAVIYLKDEKNGDYIYEEINNELEDFQTVTKRFITGTDSSGVHLIFTSQNGEEAFGGNFIISEIRPSEELLSPELIKSDAWVGTQGAWNSGNSLTIYTNTNGTFRQNLPLESYSTYSMNFNITGFGKVTIRNSREVLFEKNFSQLSPKDYSEKFTTAANNTGFYVELSRGTQGGNITFRDFSIK

SEQ ID NO: 1531 - protein, 788 aa, Bacillus thuringiensis
MNMNNTKLNARALPSFIDYFNGIYGFATGIKDIMNMIFKTDTGGNLTLDEILKNQQLLNEISGKLDGVNGSLNDLIAQGNLNTELSKEILKIANEQNQVLNDVNNKLDAINTMLHIYLPKITSMLSDVMKQNYALSLQIEYLSKQLQEISDKLDIINVNVLINSTLTEITPAYQRIKYVNEKFEELTFATETTLKVKKDSSPADILDELTELTELAKSVTKNDVDGFEFYLNTFHDVMVGNNLFGRSALKTASELIAKENVKTSGSEVGNVYNFLIVLTALQAKAFLTLTTCRKLLGLADIDYTSIMNEHLNKEKEEFRVNILPTLSNTFSNPNYAKVKGSDEDAKMIVEAKPGHALVGFEMSNDSITVLKVYEAKLKQNYQVDKDSLSEVIYGDTDKLFCPDQSEQIYYTNNIVFPNEYVITKIDFTKKMKTLRYEVTANFYDSSTGEIDLNKKKVESSEAEYRTLSANDDGVYMPLGVISETFLTPINGFGLQADENSRLITLTCKSYLRELLLATDLSNKETKLIVPPSGFISNIVENGSIEEDNLEPWKANNKNAYVDHTGGVNGTKALYVHKDGGFSQFIGDKLKPKTEYVIQYTVKGKPSIHLKDENTGYIHYEDTNNNLKDYQTITKRFTTGTDLKGVYLILKSQNGDEAWGDKFTILEIKPAEDLLSPELINPNSWITTPGASISGNKLFINLGTNGTFRQSLSLNSYSTYSISFTASGPFNVTVRNSREVLFERSNLMSSTSHISGTFKTESNNTGLYVELSRRSGGGGHISFENVSIK

SEQ ID NO: 1532 - protein, 787 aa, Bacillus thuringiensis
MNKNNTKLSTRALPSFIDYFNGIYGFATGIKDIMNMIFKTDTGGNLTLDEILKNQQLLNEISGKLDGVNGSLNDLIAQGNLNTELSKEILKIANEQNQVLNDVNNKLDAINTMLHIYLPKITSMLSDVMKQNYALSLQIEYLSKQLQEISDKLDIINVNVLINSTLTEITPAYQRIKYVNEKFEELTFATETTLKVKKDSSPADILDELTELTELAKSVTKNDVDGFEFYLNTFHDVMVGNNLFGRSALKTASELIAKENVKTSGSEVGNVYNFLIVLTALQAKAFLTLTTCRKLLGLAGIDYTSIMNEHLNKEKEEFRVNILPTLSNTFSNPNYAKVKGSDEDAKMIVEAKPGHALVGFEMSNDSITVLKVYEAKLKQNYQVDKDSLSEVIYGDTDKLFCPDQSEQIYYTNNIVFPNEYVITKIDFTKKMKTLRYEVTANFYDSSTGEIDLNKKKVESSEAEYRTLSANDDGVYMPLGVISETFLTPINGFGLQADENSRLITLTCKSYLRELLLATDLSNKETKLIVPPSGFISNIVENGSIEEDNLEPWKANNKNAYVDHTGGVNGTKALYVHKDGGFSQFIGDKLKPKTEYVIQYTVKGKPSIHLKDENTGYIHYEDTNNNLKDYQTITKRFTTGTDLKGVYLILKSQNGDEAWGDKFTILEIKPAEDLLSPELINPNSWITTPGASISGNKLFINLGTNGTFRQSLSLNSYSTYSISFTASGPFNVTVRNSRVLFERSNLMSSTSHISGTFKTESNNTGLYVELSRRSGGGGHISFENVSIK

SEQ ID NO: 1533 - protein, 788 aa, Bacillus thuringiensis
MNKNNTKLSTRALPSFIDYFNGIYGFATGIKDIMNMIFKTDTGGDLTLDEILKNQQLLNDISGKLDGVNGSLNDLIAQGNLNTELSKEILKIANEQNQVLNDVNNKLDAINTMLRVYLPKITSMLSDVMKQNYALSLQIEYLSKQLQEISDKLDIINVNVLINSTLTEITPAYQRIKYVNEKFEELTFATETSSKVKKDGSPADILDELTELTELAKSVTKNDVDGFEFYLNTFHDVMVGNNLFGRSALKTASELITKENVKTSGSEVGNVYNFLIVLTALQAKAFLTLTTCRKLLGLADIDYTSIMNEHLNKEKEEFRVNILPTLSNTFSNPNYAKVKGSDEDAKMIVEAKPGHALIGFEISNDSITVLKVYEAKLKQNYQVDKDSLSEVIYGDMDKLLCPDQSEQIYYTNNIVFPNEYVITKIDFTKKMKTLRYEVTANFYDSSTGEIDLNKKKVESSEAEYRTLSANDDGVYMPLGVISETFLTPINGFGLQADENSRLITLTCKSYLRELLLATDLSNKETKLIVPPSGFISNIVENGSIEEDNLEPWKANNKNAYVDHTGGVNGTKALYVHKDGGISQFIGDKLKPKTEYVIQYTVKGKPSIHLKDENTGYIHYEDTNNNLEDYQTINKRFTTGTDLKGVYLILKSQNGDEAWGDKFTILEIKPAEDLLSPELINPNSWITTPGASISGNKLFINLGTNGTFRQSLSLNSYSTYSISFTASGPFNVTVRNSRGVLFERSNLMSSTSHISGTFKTESNNTGLYVELSRRSGGGGHISFENVSIK

SEQ ID NO: 1534 - protein, 788 aa, Bacillus thuringiensis; identical to SEQ ID NO: 1531

SEQ ID NO: 1535 - protein, 787 aa, Bacillus thuringiensis
MNKNNTKLNARALPSFIDYFNGIYGFATGIKDIMNMIFKTDTGGNLTLDEILKNQQLLNEISGKLDGVNGSLNDLIAQGNLNTELSKEILKIANEQNQVLNDVNNKLNAINTMLHIYLPKITSMLNDVMKQNYALSLQIEYLSKQLQEISDKLDVINVNVLINSTLTEITPAYQRMKYVNEKFEDLTFATETTLKVKKNSSPADILDELTELTELAKSVTKNDVDGFEFYLNTFHDVMVGNNLFGRSALKTASELIAKENVKTSGSEVGNVYNFLIVLTALQAKAFLTLTTCRKLLGLADIDYTFIMNEHLDKEKEEFRVNILPTLSNTFSNPNYAKAKGSNEDAKIIVEAKPGYALVGFEMSNDSITVLKAYQAKLKQDYQVDKDSLSEIVYGDMDKLLCPDQSEQIYYTNNIAFPNEYVITKITFTKKMNSLRYEATANFYDSSTGDIDLNKTKVESSEAEYSTLSASTDGVYMPLGIISETFLTPINGFGIVVDENSKLVNLTCKSYLREVLLATDLSNKETKLIVPPIGFISNIVENGNLEGENLEPWKANNKNAYVDHTGGVNGTKALYVHKDGEFSQFIGDKLKSKTEYVIQYIVKGKASILLKDEKNGDCIYEDTNNGLEDFQTITKSFITGTDSSGVHLIFNSQNGDEAFGENFTISEIRLSEDLLSPELINSDAWVGSQGTWISGNSLTINSNVNGTFRQNLSLESYSTYSMNFNVNGFAKVTVRNSREVLFEKNYPQLSPKDISEKFTTAANNTGLYVELSRFTSGGAINFRNFSIK

SEQ ID NO: 1536 - protein, 787 aa, Bacillus thuringiensis
MNKNNTKLSARALPSFIDYFNGIYGFATGIKDIMNMIFKTDTGGNLTLDEILKNQQLLNEISGKLDGVNGSLNDLIAQGNLNTELSKEILKIANEQNQVLNDVNNKLNAINTMLHIYLPKITSMLNDVMKQNYALSLQIEYLSKQLQEISDKLDVINVNVLINSTLTEITPAYQRMKYVNEKFEDLTFATETTLKVKKNSSPADILDELTELTELAKSVTKNDVDGFEFYLNTFHDVMVGNNLFGRSALKTASELIAKENVKTSGSEVGNVYNFLIVLTALQAKAFLTLTTCRKLLGLADIDYTFIMNEHLDKEKEEFRVNILPTLSNTFSNPNYAKAKGSNEDAKIIVEAKPGYALVGFEMSNDSITVLKAYQAKLKRDYQVDKDSLSEIVYGDMDKLLCPDQSEQIYYTNNIAFPNEYVITKITFTKKMNSLRYEATANFYDSSTGDIDLNKTKVESSEAEYSTLSASTDGVYTPLGIISETFLTPINGFGIVVDENSKLVNLTCKSYLREVLLATDLSNKETKLIVPPIGFISNIVENGNLEGENLEPWKANNKNAYVDHTGGVNGTKALYVHKDGEFSQFIGDKLKSKTEYVIQYIVKGKASILLKDEKNGDCIYEDTNNGLEDFQTITKSFITGTDSSGVHLIFNSQNGDEAFGENFTISEIRLSEDLLSPELINSDAWVGSQGTWISGNSLTINSNVNGTFRQNLSLESYSTYSMNFNVNGFAKVTVRNPREVLFEKNYPQLSPKDISEKFTTAANNTGLYVELSRFTSGGAINFRDFSIK

SEQ ID NO: 1537 - protein, 840 aa, Bacillus thuringiensis
  MISC_FEATURE (58)..(58): Xaa is Ala, Arg, Asn, Asp, Asx, Cys, Glu, Gln, Glx, Gly, His, Ile, Leu, Lys, Met, Phe, Pro, Ser, Thr, Trp, Tyr, or Val.
MNMNNTKLNARALPSFIDYFNGIYGFATGIKDIMNMIFKTDTGGNLTLDEILKNQQLXNEISGKLDGVNGSLNDLIAQGNLNTELSKEILKIANEQNQVLNDVNNKLNAINTMLHIYLPKITSMLNDVMKQNYALSLQIEYLSKQLQEISDKLDVINVNVLINSTLTEITPAYQRMKYVNEKFEDLTFATETTLKVKKNSSPADILDELTELTELAKSVTKNDVDGFEFYLNTFHDVMVGNNLFGRSALKTASELIAKENVKTSGSEVGNVYNFLIVLTALQAKAFLTLTTCRKLLGLADIDYTFIMNEHLDKEKEEFRVNILPTLSNTFSNPNYAKAKGSNEDAKIIVEAKPGYALVGFEMSNDSITVLKAYQAKLKQDYQVDKDSLSEIVYGDMDKLLCPDQSEQIYYTNNIAFPNEYVITKITFTKKMNSLRYEATANFYDSSTGDIDLNKTKVESSEAEYSTLSASTDGVYMPLGIISETFLTPINGFGIVVDENSKLVNLTCKSYLREVLLATDLSNKETKLIVPPIGFISNIVENGNLEGENLEPWKANNKNAYVDHTGGVNGTKALYVHKDGEFSQFIGDKLKSKTEYVIQYIVKGKASILLKDEKNGDCIYEDTNNGLEDFQTITKSFITGTDSSGVHLIFNSQNGDEAFGENFTISEIRLSEDLLSPELINSDAWVGSQGTWISGNSLTINSNVNGTFRQNLSLESYSTYSMNFNVNGFAKVTVRNSREVLFEKNYPQLSPKDISEKFTTAANNTGLYVELSRFTSGGAINFRDFSIKLVDPNSVQARLQDVDGTIDTRSKLAAAQLYTRASQPELAPEDPEDLEHHHHHH

SEQ ID NO: 1538 - protein, 787 aa, Bacillus thuringiensis; identical to SEQ ID NO: 1535

SEQ ID NO: 1539 - protein, 787 aa, Bacillus thuringiensis
MNKNNTKLSARALPSFIDYFNGIYGFATGIKDIMNMIFKTDTGGNLTLDEILKNQQLLNEISGKLDGVNGSLNDLIAQGNLNTELSKEILKIANEQNQVLNDVNNKLNAINTMLHIYLPKITSMLNDVMKQNYALSLQIEYLSKQLQEISDKLDVINVNVLINSTLTEITPAYQRMKYVNEKFEDLTFATETTLKVKKNSSPADILDELTELTELAKSVTKNDVDGFEFYLNTFHDVMVGNNLFGRSALKTASELIAKENVKTSGSEVGNVYNFLIVLTALQAKAFLTLTTCRKLLGLADIDYTFIMNEHLDKEKEEFRVNILPTLSNTFSNPNYAKAKGSNEDAKIIVEAKPGYALVGFEMSNDSITVLKAYQAKLKQDYQVDKDSLSEIVYGDMDKLLCPDQSEQIYYTNNIAFPNEYVITKITFTKKMNSLRYEATANFYDSSTGDIDLNKTKVESSEAEYSTLSASTDGVYMPLGIISETFLTPINGFGIVVDENSKLVNLTCKSYLREVLLATDLSNKETKLIVPPIGFISNIVENGNLEGENLEPWKANNKNAYVDHTGGVNGTKALYVHKDGEFSQFIGDKLKSKTEYVIQYIVKGKASILLKDEKNGDCIYEDTNNGLEDFQTITKSFITGTDSSGVHLIFNSQNGDEAFGENFTISEIRLSEDLLSPELINSDAWVGSQGTWISGNSLTINSNVNGTFRQNLSLESYSTYSMNFNVNGFAKVTVRNSREVLFEKNYPQLSPKDISEKFTTAANNTGLYVELSRFTSGGAINFRDFSIK

SEQ ID NO: 1540 - protein, 795 aa, Bacillus thuringiensis
MNKNNTKLSTRALPSFIDYFNGIYGFATGIKDIMNMIFKTDTGGDLTLDEILKNQQLLNEISGKLDGVNGSLNDLIAQGNLNTELSKEILKIANEQNQVLNDVNNKLDAINTMLHIYLPKITSMLSDVMKQNYALSLQIEYLSKQLQEISDKLDIINVNVLINSTLTEITPAYQRIKYVNEKFEELTFATETNLKVKKDGSPADILDELTELTELAKSVTKNDVDGFEFYLNTFHDVMVGNNLFGRSALKTASELITKENVKTSGSEVGNVYNFLIVLTALQAKAFLTLTTCRKLLGLADIDYTSIMNEHLNKEKEEFRVNILPTLSNTFSNPNYIKTKGSDEDAEVIIQAEPGHALVGFEMINDPSPALKVYQAKLKPNYQVDKQSLSETVYGDMDKILCPDKSQQMYYLHNITFPNEYVITEIIFTKKKNSLRYEVIANYYEFSSGDIDLNKKLVKSSEAEYSTLSVSNDAIYMPLGVISETFLTPIKGFGLTVDESSRLVTLTCKSYLREILLATDLSNKATKLIVPPNGFISNLVENGDIEADNIEPWKGNNKNAYVDHTGGVNGTKALYTQDDGEFSQFIGDKLKSKTEYIIQYTVKGNTSIYLKDKKNENVIYEDKNNNLEAFQTITKRFTTELDSSDVYLVFKCKNGYKAWGDNFLITEIRPKEVVSPELIKVENWIGMGGSNHVNPDSLLLFTGGRSILKQNLQLDSYSTYRVRFSLMVIGKAKVIIRNSSEVLFEKSYVNDSEGVLEGVSETFTTKSIQDNFYVELSNEGTFGSKDVAYFYNFSIK

SEQ ID NO: 1541 - protein, 795 aa, Bacillus thuringiensis; identical to SEQ ID NO: 1540

SEQ ID NO: 1542 - protein, 803 aa, Bacillus thuringiensis
MNMNNTKLNARALPSFIDYFNGIYGFATGIKDIMNMIFKTDTGGGNLTLDEILKNQDLLNQISDKLDGINGDLGDLIAQGNLNSELTKELLKIANEQNLMLNNVNAQLNSINATLNTYLPKITSMLNEVMKQNYVLSLQIEFLSKQLQEISDKLDIINLNVLINSTLTEITPAYQRIKYVNDKFDELTSTVEKNPKINQDNFTEDVIDNLTDLTELARSVTRNDMDSFEFYIKTFHDVMIGNNLFSRSALKTASELIAKENIHTRGSEIGNVYTFMIVLTSLQAKAFLTLTTCRKLLGLADIDYTQIMNENLDREKEEFRLNILPTLSNDFSNPNYTETLGSDLVDPIVTLEAEPGYALIGFEILNDPLPVLKVYQAKLKPNYQVDKESIMENIYGNIHKLLCPKQREQKYYIKDMTFPEGYVITKIVFEKKLNLLGYEVTANLYDPFTGSIDLNKTILESWKEDCCEEDCCEEDCCEEDCCEELYKIIEADTNGVYMPLGVISETFLTPIYSFKLIIDEKTKKISLAGKSYLRESLLATDLVNKETNLIPSPNGFISSIVQNWHITSDNIEPWKANNKNAYVDKTDAMVGFSSLYTHKDGEFLQFIGAKLKAKTEYIIQYTVKGNPEVYLKNNKDICYEDKTNNFDTFQTITKKFNSGVDPSEIYLVFKNQIGYEAWGNNFIILEIKSLETLPQILKPENWIPLGNAEIKEDGKIEISGNGSMNQYIQLEQNSKYHLRFSVKGKGRVTMQAQTSHINVPATNEEVSIMIETTRLYGEGIISLLNDEVENSGVIFSDVSIVKE

SEQ ID NO: 1543 - protein, 803 aa, Bacillus thuringiensis; identical to SEQ ID NO: 1542

SEQ ID NO: 1544 - protein, 801 aa, Bacillus thuringiensis
MNNTKLNARALPSFIDYFNGIYGFATGIKDIMNMIFKTDTGGGNLTLDEILKNQDLLNQISDKLDGINGDLGDLIAQGNLNSELTKELLKIANEQNLMLNNVNAQLNSINSTLNTYLPKITSMLSEVMKQNYVLSLQIEFLSEQLQEISDKLDVINLNVLINSTLTEITPAYQRIKYVNDKFDELTSTVEKNPKINQDNFTEDVIDNLTDLTELARSVTRNDMDSFEFYIKTFHDVMIGNNLFSRSALKTASELIAKENIHTMGSEIGNVYTFMVVLTSLQAKAFLTLTACRKLLGLTDIDYTQIMNENLNREKEEFRLNILPTLSNDFSNPNYTETLGSDLVDPIVTLEADPGYALIGFEILNDPLPVLKVYQAKLKPNYQVDKESIMENIYGNIHKLLCPKQRHQKYYIKDITFPEGYVITKIVFEKKLNLLGYEVTANLYDPFTGSIDLNKTILESWKEECCEEECCEEECCEEECCEELYKIIEADTNGVYMPLGVISETFLTPIYSFKLIIDERTKRISLAGKSYLRESLLATDLVNKDTNLIPSPNGFINSIVENWNITSDNIEPWKANNKNAYVDKTDDMVGFNSLYTHKDGEFLQFIGAKLKAKTEYIIQYTVKGSPEVYLKNNKGIFYEDTTNKFDTFQTITKKFNSGVDPSEIYLVFKNQIGYEAWGNKFIILEIKSFETLPQILKPENWMPFGNAEIKEDGKIEISGNGTMTQNIQLEQNSKYHLRFSVKGKGRVAIQTQSSHINVPATNEEVSTMITTRNLYGEGMIYLFNDDVENSKVIFSDVSLVKE

SEQ ID NO: 1545 - protein, 801 aa, Bacillus thuringiensis; identical to SEQ ID NO: 1544

SEQ ID NO: 1546 - protein, 700 aa, Bacillus thuringiensis
MNNTKLNARALPSFIDYFNGIYGFATGIKDIMNMIFKTDTGGGNLTLDEILKNQDLLNQISDKLDGINGDLGDLIAQGNLNSELTKELLKIANEQNLMLNNVNAQLNSINSTLNTYLPKITSMLSEVMKQNYVLSLQIEFLSEQLQEISDKLDVINLNVLINSTLTEITPAYQRIKYVNDKFDELTSTVEKNPKINQDNFTEDVIDNLTDLTELARSVTRNDMDSFEFYIKTFHDVMIGNNLFSRSALKTASELIAKENIHTMGSEIGNVYTFMVVLTSLQAKAFLTLTACRKLLGLTDIDYTQIMNENLNREKEEFRLNILPTLSNDFSNPNYTETLGSDLVDPIVTLEADPGYALIGFEILNDPLPVLKVYQAKLKPNYQVDKESIMENIYGNIHKLLCPKQRQQKYYIKDITFPEGYVITKIVFEKKLNLLGYEVTANLYDPFTGSIDLNKTILESWKEECCEEECCEEECCEEECCEELYKIIEADTNGVYMPLGVISETFLTPIYSFKLIIDERTKRISLAGKSYLRESLLATDLVNKDTNLIPSPNGFISSIVENWNITSDNIEPWKANNKNAYVDKTDDMVGFNSLYTHKDGEFLQFIGAKLKAKTEYIIQYTVKGSPEVYLKNNKGIFYEDTTNKFDTFQTITKKFNSGVDPSEIYLVFKNQIGYEAWGNKFIILEIKSFETLPQILKPENW

SEQ ID NO: 1547 - protein, 490 aa, Bacillus thuringiensis
MNKNNTKLSARALPSFIDYFNGIYGFATGIKDIMNMIFKTDTGGGNLTLDEILKNQDLLNQISDKLDGINGDLGDLIAQGNLNSELIKELLKIANEQNLMLNNVNAQLNSINSTLNTYLPKITSMLSEVMKQNYVLSLQIEFLSEQLQEISDKLDVINLNVLINSTLTEITPAYQRIKYVNDKFDELTSTVEKNPKINQDNFTEDVIDNLTDLTELARSVTRNDMDSFEFYIKTFHDAMIGNNLFSRSALKTASELIAKENIHTMGSEIGNVYTFMVVLTSLQAKAFLTLTACRKLLGLTDIDYTQIMNENLNREKEEFRLNVLPTLSNDFSNPNYTETLGSDLVDPIVTLEADPGYALIGFEILNDPLPVLKVYQAKLKPNYQVDKESIMENIYGNIHKLLCPKQRQQKYYIKDITFPEGYVITKIVFEKKLNLLGYEVTANLYDPFTGSIDLNKTILESWKEECCEEECCEEECCEEECCEELYKIIE

SEQ ID NO: 1548 - protein, 803 aa, Bacillus thuringiensis
MNKNNTKLNARALPSFIDYFNGIYGFATGIKDIMNMIFKTDTGGDLTLDEILKNQQLLNEISGKLDGVNGSLNDLIAQGNLNTELSKEILKIANEQNQVLNDVNNKLDAINTMLNIYLPKITSMLSDVMKQNYALSLQIEYLSRQLQEISDKLDVINLNVLINSTLTEITPSYQRIKYVNEKFDKLTFATESTLRAKQGIFNEDSFDNNTLENLTDLAELAKSITKNDVDSFEFYLHTFHDVLIGNNLFGRSALKTASELITKDEIKTSGSEIGKVYSFLIVLTSLQAKAFLTLTTCRKLLGLSDIDYTSIMNEHLNNEKNEFRDNILPALSNKFSNPSYAKTIGSDNYAKVILESEPGYALVGFEIINDPIPVLKAYKAKLKQNYQVDNQSLSEIVYLDIDKLFCPENSEQKYYTKNLTFPDGYVITKITFEKKLNNLIYEATANFYDPSTGDIDLNKKQVESTFPQTDYITMDIGDDDGIYMPLGVISETFLTPINSFGLEVDAKSKTLTLKCKSYLREYLLESDLKNKETGLIAPPNVFISNVVKNWDIEEDSLEPWVANNKNAYVDNTGGIERSKALFTQGDGEFSQFIGDKLKPNTDYIIQYTVKGKPAIYLKNKSTGYITYEDTNGNSEEFQTIAVKFTSETDLSQTHLVFKSQNGYEAWGDNFIILEAKLFETPESPELIKFNDWERFGTTYITGNELRIDHSRGGYFRQSLNIDSYSTYDLSFSFSGLWAKVIVKNSRGVVLFEKVKNNGSSYEDISESFTTASNKDGFFIELTAERTSSTFHSFRDISIKEKIE

SEQ ID NO: 1549 - protein, 803 aa, Bacillus thuringiensis
MNMNNTKLNARALPSFIDYFNGIYGFATGIKDIMNMIFKTDTGGDLTLDEILKNQQLLNEISGKLDGVNGSLNDLIAQGNLNTELSKEILKIANEQNQVLNDVNNKLDAINTMLNIYLPKITSMLSDVMKQNYALSLQIEYLSRQLQEISDKLDVINLNVLINSTLTEITPSYQRIKYVNEKFDKLTFATESTLRAKQGIFNEDSFDNNTLENLTDLAELAKSITKNDVDSFEFYLHTFHDVLIGNNLFGRSALKTASELITKDEIKTSGSEIGKVYSFLIVLTSLQAKAFLTLTTCRKLLGLSDIDYTSIMNEHLNNEKNEFRDNILPALSNKFSNPSYAKTIGSDNYAKVILESEPGYALVGFEIINDPIPVLKAYKAKLKQNYQVDNQSLSEIVYLDIDKLFCPENSEQKYYTKNLTFPDGYVITKITFEKKLNNLIYEATANFYDPSTGDIDLNKKQVESTFPQTDYITMDIGDDDGIYMPLGVISETFLTPINSFGLEVDAKSKTLTLKCKSYLREYLLESDLKNKETGLIAPPNVFISNVVKNWDIEEDSLEPWVANNKNAYVDNTGGIERSKALFTQGDGEFSQFIGDKLKPNTDYIIQYTVKGKPAIYLKNKSTGYITYEDTNGNSEEFQTIAVKFTSETDLSQTHLVFKSQNGYEAWGDNFIILEAKLFETPESPELIKFNDWERFGTTYITGNELRIDHSRGGYFRQSLNIDSYSTYDLSFSFSGLWAKVIVKNSRGVVLFEKVKNNGSSYEDISESFTTASNKDGFFIELTAERTSSTFHSFRDISIKEKIE

SEQ ID NO: 1550 - protein, 803 aa, Bacillus thuringiensis
MNKNNTKLNARALPSFIDYFNGIYGFATGIKDIMNMIFKTDTGGDLTLDEILKNQQLLNEISGKLDGVNGSLNDLIAQGNLNTELSKEILKIANEQNQVLNDVNNKLDAINTMLNIYLPKITSMLSDVMKQNYALSLQIEYLSRQLQEISDKLDVINLNVLINSTLTEITPSYQRIKYVNEKFDKLTFATESTLRAKQGIFNEDSFDNNTLENLADLAELAKSITKNDVDSFEFYLHTFHDVLIGNNLFGRSALKTASELITKDEIKTSGSEIGKVYSFLIVLTSLQAKAFLTLTTCRKLLGLSDIDYTSIMNEHLNNEKNEFRDNILPALSNKFSNPSYAKTIGSDNYAKVILESEPGYALVGFEIINDPIPVLKAYKAKLKQNYQVDNQSLSEIVYLDIDKLFCPENSEQKYYTKNLTFPDGYVITKITFEKKLNNLIYEATANFYDPSTGDIDLNKKQVESTFPQTDYITMDIGDDDGIYMPLGVISETFLTPINSFGLEVDAKSKTLTLKCKSYLREYLLESDLKNKETGLIAPPNVFISNVVKNWDIEEDSLEPWVANNKNAYVDNTGGIERSKALFTQGDGEFSQFIGDKLKPNTDYIIQYTVKGKPAIYLKNKSTGYITYEDTNGNSEEFQTIAVKFTSETDLSQTHLVFKSQNGYEAWGDNFIILEAKLFETPESPELIKFNDWERFGTTYITGNELRIDHSRGGYFRQSLNIDSYSTYDLSFSFSGLWAKVIVKNSRGVVLFEKVKNNGSSYEDISESFTTASNKDGFFIELTAERTSSTFHSFRDISIKEKIE

SEQ ID NO: 1551 - protein, 803 aa, Bacillus thuringiensis; identical to SEQ ID NO: 1549

SEQ ID NO: 1552 - protein, 803 aa, Bacillus thuringiensis; identical to SEQ ID NO: 1550

SEQ ID NO: 1553 - protein, 60 aa, Hadronyche versuta
MNTATGFIVLLVLATILGGIEAGESHMRKDAMGRVRRQYCVPVDQPCSLNTQPCCDDATC

SEQ ID NO: 1554 - protein, 76 aa, Hadronyche versuta; identical to SEQ ID NO: 569

SEQ ID NO: 1555 - protein, 75 aa, Hadronyche versuta; identical to SEQ ID NO: 572

SEQ ID NO: 1556 - protein, 38 aa, Hadronyche versuta; identical to SEQ ID NO: 573

SEQ ID NO: 1557 - protein, 75 aa, Hadronyche versuta; identical to SEQ ID NO: 574

SEQ ID NO: 1558 - protein, 38 aa, Hadronyche versuta; identical to SEQ ID NO: 575

SEQ ID NO: 1559 - protein, 76 aa, Hadronyche versuta; identical to SEQ ID NO: 576

SEQ ID NO: 1560 - protein, 76 aa, Hadronyche versuta; identical to SEQ ID NO: 578

SEQ ID NO: 1561 - protein, 39 aa, Hadronyche versuta; identical to SEQ ID NO: 6

SEQ ID NO: 1562 - protein, 76 aa, Hadronyche versuta; identical to SEQ ID NO: 580

SEQ ID NO: 1563 - protein, 39 aa, Hadronyche versuta; identical to SEQ ID NO: 581

SEQ ID NO: 1564 - protein, 76 aa, Hadronyche versuta; identical to SEQ ID NO: 582

SEQ ID NO: 1565 - protein, 39 aa, Hadronyche versuta; identical to SEQ ID NO: 581

SEQ ID NO: 1566 - protein, 76 aa, Hadronyche versuta; identical to SEQ ID NO: 584

SEQ ID NO: 1567 - protein, 39 aa, Hadronyche versuta; identical to SEQ ID NO: 581

SEQ ID NO: 1568 - protein, 76 aa, Atrax robustus; identical to SEQ ID NO: 586

SEQ ID NO: 1569 - protein, 39 aa, Atrax robustus; identical to SEQ ID NO: 581

SEQ ID NO: 1570 - protein, 22 aa, Hadronyche versuta
  MISC_FEATURE (4)..(4): Xaa is Ala, Arg, Asn, Asp, Asx, Cys, Glu, Gln, Glx, Gly, His, Ile, Leu, Lys, Met, Phe, Pro, Ser, Thr, Trp, Tyr, or Val.
  MISC_FEATURE (10)..(10): Xaa is Ala, Arg, Asn, Asp, Asx, Cys, Glu, Gln, Glx, Gly, His, Ile, Leu, Lys, Met, Phe, Pro, Ser, Thr, Trp, Tyr, or Val.
  MISC_FEATURE (16)..(16): Xaa is Ala, Arg, Asn, Asp, Asx, Cys, Glu, Gln, Glx, Gly, His, Ile, Leu, Lys, Met, Phe, Pro, Ser, Thr, Trp, Tyr, or Val.
  MISC_FEATURE (20)..(20): Xaa is Ala, Arg, Asn, Asp, Asx, Cys, Glu, Gln, Glx, Gly, His, Ile, Leu, Lys, Met, Phe, Pro, Ser, Thr, Trp, Tyr, or Val.
MNTXTGFIVXLVLATXLGGXEA

SEQ ID NO: 1571 - protein, 41 aa, Hadronyche versuta; identical to SEQ ID NO: 5

SEQ ID NO: 1572 - protein, 39 aa, Hadronyche versuta; identical to SEQ ID NO: 12

SEQ ID NO: 1573 - protein, 76 aa, Hadronyche versuta; identical to SEQ ID NO: 569

SEQ ID NO: 1574 - protein, 39 aa, Hadronyche versuta; identical to SEQ ID NO: 571

SEQ ID NO: 1575 - protein, 75 aa, Hadronyche versuta; identical to SEQ ID NO: 572

SEQ ID NO: 1576 - protein, 38 aa, Hadronyche versuta; identical to SEQ ID NO: 573

SEQ ID NO: 1577 - protein, 75 aa, Hadronyche versuta; identical to SEQ ID NO: 574

SEQ ID NO: 1578 - protein, 38 aa, Hadronyche versuta; identical to SEQ ID NO: 575

SEQ ID NO: 1579 - protein, 76 aa, Hadronyche versuta; identical to SEQ ID NO: 576

SEQ ID NO: 1580 - protein, 39 aa, Hadronyche versuta; identical to SEQ ID NO: 12

SEQ ID NO: 1581 - protein, 76 aa, Hadronyche versuta; identical to SEQ ID NO: 578

SEQ ID NO: 1582 - protein, 39 aa, Hadronyche versuta; identical to SEQ ID NO: 6

SEQ ID NO: 1583 - protein, 76 aa, Hadronyche versuta; identical to SEQ ID NO: 580

SEQ ID NO: 1584 - protein, 39 aa, Hadronyche versuta; identical to SEQ ID NO: 581

SEQ ID NO: 1585 - protein, 76 aa, Hadronyche versuta; identical to SEQ ID NO: 582

SEQ ID NO: 1586 - protein, 39 aa, Hadronyche versuta; identical to SEQ ID NO: 581

SEQ ID NO: 1587 - protein, 76 aa, Hadronyche versuta; identical to SEQ ID NO: 584

SEQ ID NO: 1588 - protein, 39 aa, Hadronyche versuta; identical to SEQ ID NO: 581

SEQ ID NO: 1589 - protein, 39 aa, Atrax robustus; identical to SEQ ID NO: 581

SEQ ID NO: 1590 - protein, 39 aa, Atrax robustus; identical to SEQ ID NO: 581

SEQ ID NO: 1591 - protein, 22 aa, Hadronyche versuta
  MISC_FEATURE (4)..(4): Xaa is Ala, Arg, Asn, Asp, Asx, Cys, Glu, Gln, Glx, Gly, His, Ile, Leu, Lys, Met, Phe, Pro, Ser, Thr, Trp, Tyr, or Val.
  MISC_FEATURE (10)..(10): Xaa is Ala, Arg, Asn, Asp, Asx, Cys, Glu, Gln, Glx, Gly, His, Ile, Leu, Lys, Met, Phe, Pro, Ser, Thr, Trp, Tyr, or Val.
  MISC_FEATURE (16)..(16): Xaa is Ala, Arg, Asn, Asp, Asx, Cys, Glu, Gln, Glx, Gly, His, Ile, Leu, Lys, Met, Phe, Pro, Ser, Thr, Trp, Tyr, or Val.
  MISC_FEATURE (20)..(20): Xaa is Ala, Arg, Asn, Asp, Asx, Cys, Glu, Gln, Glx, Gly, His, Ile, Leu, Lys, Met, Phe, Pro, Ser, Thr, Trp, Tyr, or Val.
MNTXTGFIVXLVLATXLGGXEA

SEQ ID NO: 1592 - protein, 15 aa, Hadronyche versuta
  MISC_FEATURE (1)..(1): Xaa is Ala, Arg, Asn, Asp, Asx, Cys, Glu, Gln, Glx, Gly, His, Ile, Leu, Lys, Met, Phe, Pro, Ser, Thr, Trp, Tyr, or Val.
XESHMRKDAMGRVRR

SEQ ID NO: 1593 - protein, 15 aa, Hadronyche versuta
  MISC_FEATURE (1)..(1): Xaa is Ala Arg Asn Asp Asx Cys Glu Gln Glx Gly His Ile Leu Lys Met Phe Pro Ser Thr Trp Tyr Val.
  MISC_FEATURE (1)..(1): Xaa is Ala, Arg, Asn, Asp, Asx, Cys, Glu, Gln, Glx, Gly, His, Ile, Leu, Lys, Met, Phe, Pro, Ser, Thr, Trp, Tyr, or Val.
XESHMRKDAMGRVRR

SEQ ID NO: 1594 - protein, 6 aa, Artificial Sequence
  cleavable linker
AFVRLF

SEQ ID NO: 1595 - protein, 5 aa, Artificial Sequence
  cleavable linker
AKLFV

SEQ ID NO: 1596 - protein, 6 aa, Artificial Sequence
  cleavable linker
ALFALK

SEQ ID NO: 1597 - protein, 5 aa, Artificial Sequence
  cleavable linker
ALFLK

SEQ ID NO: 1598 - protein, 5 aa, Artificial Sequence
  cleavable linker
ALFLR

SEQ ID NO: 1599 - protein, 4 aa, Artificial Sequence
  cleavable linker
ALFR

SEQ ID NO: 1600 - protein, 6 aa, Artificial Sequence
  cleavable linker
ALFRLR

SEQ ID NO: 1601 - protein, 6 aa, Artificial Sequence
  cleavable linker
ALKALF

SEQ ID NO: 1602 - protein, 5 aa, Artificial Sequence
  cleavable linker
ALKFF

SEQ ID NO: 1603 - protein, 6 aa, Artificial Sequence
  cleavable linker
ALKFLV

SEQ ID NO: 1604 - protein, 6 aa, Artificial Sequence
  cleavable linker
ALKFLV

SEQ ID NO: 1605 - protein, 6 aa, Artificial Sequence
  cleavable linker
ALKLFV

SEQ ID NO: 1606 - protein, 6 aa, Artificial Sequence
  cleavable linker
FFADIK

SEQ ID NO: 1607 - protein, 5 aa, Artificial Sequence
  cleavable linker
FFALK

SEQ ID NO: 1608 - protein, 4 aa, Artificial Sequence
  cleavable linker
FFLK

SEQ ID NO: 1609 - protein, 4 aa, Artificial Sequence
  cleavable linker
FFLR

SEQ ID NO: 1610 - protein, 5 aa, Artificial Sequence
  cleavable linker
FFRLR

SEQ ID NO: 1611 - protein, 6 aa, Artificial Sequence
  cleavable linker
FGYRIK

SEQ ID NO: 1612 - protein, 5 aa, Artificial Sequence
  cleavable linker
FLRLF

SEQ ID NO: 1613 - protein, 5 aa, Artificial Sequence
  cleavable linker
FYARR

SEQ ID NO: 1614 - protein, 6 aa, Artificial Sequence
  cleavable linker
GGLRKK

SEQ ID NO: 1615 - protein, 6 aa, Artificial Sequence
  cleavable linker
IFVALK

SEQ ID NO: 1616 - protein, 5 aa, Artificial Sequence
  cleavable linker
IFVLK

SEQ ID NO: 1617 - protein, 5 aa, Artificial Sequence
  cleavable linker
IFVLR

SEQ ID NO: 1618 - protein, 4 aa, Artificial Sequence
  cleavable linker
IFVR

SEQ ID NO: 1619 - protein, 6 aa, Artificial Sequence
  cleavable linker
IFVRLR

SEQ ID NO: 1620 - protein, 6 aa, Artificial Sequence
  cleavable linker
ILFNIK

SEQ ID NO: 1621 - protein, 6 aa, Artificial Sequence
  cleavable linker
LFAAPF

SEQ ID NO: 1622 - protein, 6 aa, Artificial Sequence
  cleavable linker
LFVALK

SEQ ID NO: 1623 - protein, 5 aa, Artificial Sequence
  cleavable linker
LFVLK

SEQ ID NO: 1624 - protein, 5 aa, Artificial Sequence
  cleavable linker
LFVLR

SEQ ID NO: 1625 - protein, 4 aa, Artificial Sequence
  cleavable linker
LFVR

SEQ ID NO: 1626 - protein, 6 aa, Artificial Sequence
  cleavable linker
LFVRLR

SEQ ID NO: 1627 - protein, 7 aa, Artificial Sequence
  cleavable linker
LFVRVFL

SEQ ID NO: 1628 - protein, 4 aa, Artificial Sequence
  cleavable linker
LGER

SEQ ID NO: 1629 - protein, 5 aa, Artificial Sequence
  cleavable linker
LKALF

SEQ ID NO: 1630 - protein, 4 aa, Artificial Sequence
  cleavable linker
LKFF

SEQ ID NO: 1631 - protein, 5 aa, Artificial Sequence
  cleavable linker
LKIFV

SEQ ID NO: 1632 - protein, 5 aa, Artificial Sequence
  cleavable linker
LKLFV

SEQ ID NO: 1633 - protein, 5 aa, Artificial Sequence
  cleavable linker
LRALF

SEQ ID NO: 1634 - protein, 4 aa, Artificial Sequence
  cleavable linker
LRFF

SEQ ID NO: 1635 - protein, 5 aa, Artificial Sequence
  cleavable linker
LRIFV

SEQ ID NO: 1636 - protein, 5 aa, Artificial Sequence
  cleavable linker
LRLFV

SEQ ID NO: 1637 - protein, 4 aa, Artificial Sequence
  cleavable linker
RALF

SEQ ID NO: 1638 - protein, 4 aa, Artificial Sequence
  cleavable linker
RIFV

SEQ ID NO: 1639 - protein, 4 aa, Artificial Sequence
  cleavable linker
RLFV

SEQ ID NO: 1640 - protein, 6 aa, Artificial Sequence
  cleavable linker
RLRALF

SEQ ID NO: 1641 - protein, 5 aa, Artificial Sequence
  cleavable linker
RLRFF

SEQ ID NO: 1642 - protein, 6 aa, Artificial Sequence
  cleavable linker
RLRIFV

SEQ ID NO: 1643 - protein, 6 aa, Artificial Sequence
  cleavable linker
RLRLFV

SEQ ID NO: 1644 - protein, 6 aa, Artificial Sequence
  cleavable linker
RRKAFV

SEQ ID NO: 1645 - protein, 6 aa, Artificial Sequence
  cleavable linker
RRKLIF

SEQ ID NO: 1646 - protein, 6 aa, Artificial Sequence
  cleavable linker
RRRFFA

SEQ ID NO: 1647 - protein, 6 aa, Artificial Sequence
  cleavable linker
VFGRKG

SEQ ID NO: 1648 - protein, 5 aa, Artificial Sequence
  cleavable linker
YFVRK

SEQ ID NO: 1649 - protein, 8 aa, Artificial Sequence
  cleavable linker
AFVRLFGS

SEQ ID NO: 1650 - protein, 7 aa, Artificial Sequence
  cleavable linker
AKLFVGS

SEQ ID NO: 1651 - protein, 8 aa, Artificial Sequence
  cleavable linker
ALFALKGS

SEQ ID NO: 1652 - protein, 7 aa, Artificial Sequence
  cleavable linker
ALFLKGS

SEQ ID NO: 1653 - protein, 7 aa, Artificial Sequence
  cleavable linker
ALFLRGS

SEQ ID NO: 1654 - protein, 6 aa, Artificial Sequence
  cleavable linker
ALFRGS

SEQ ID NO: 1655 - protein, 8 aa, Artificial Sequence
  cleavable linker
ALFRLRGS

SEQ ID NO: 1656 - protein, 8 aa, Artificial Sequence
  cleavable linker
ALKALFGS

SEQ ID NO: 1657 - protein, 7 aa, Artificial Sequence
  cleavable linker
ALKFFGS

SEQ ID NO: 1658 - protein, 8 aa, Artificial Sequence
  cleavable linker
ALKFLVGS

SEQ ID NO: 1659 - protein, 8 aa, Artificial Sequence
  cleavable linker
ALKIFVGS

SEQ ID NO: 1660 - protein, 8 aa, Artificial Sequence
  cleavable linker
ALKLFVGS

SEQ ID NO: 1661 - protein, 8 aa, Artificial Sequence
  cleavable linker
FFADIKGS

SEQ ID NO: 1662 - protein, 7 aa, Artificial Sequence
  cleavable linker
FFALKGS

SEQ ID NO: 1663 - protein, 6 aa, Artificial Sequence
  cleavable linker
FFLKGS

SEQ ID NO: 1664 - protein, 6 aa, Artificial Sequence
  cleavable linker
FFLRGS

SEQ ID NO: 1665 - protein, 7 aa, Artificial Sequence
  cleavable linker
FFRLRGS

SEQ ID NO: 1666 - protein, 8 aa, Artificial Sequence
  cleavable linker
FGYRIKGS

SEQ ID NO: 1667 - protein, 7 aa, Artificial Sequence
  cleavable linker
FLRLFGS

SEQ ID NO: 1668 - protein, 7 aa, Artificial Sequence
  cleavable linker
FYARRGS

SEQ ID NO: 1669 - protein, 8 aa, Artificial Sequence
  cleavable linker
GGLRKKGS

SEQ ID NO: 1670 - protein, 8 aa, Artificial Sequence
  cleavable linker
IFVALKGS

SEQ ID NO: 1671 - protein, 7 aa, Artificial Sequence
  cleavable linker
IFVLKGS

SEQ ID NO: 1672 - protein, 7 aa, Artificial Sequence
  cleavable linker
IFVLRGS

SEQ ID NO: 1673 - protein, 6 aa, Artificial Sequence
  cleavable linker
IFVRGS

SEQ ID NO: 1674 - protein, 8 aa, Artificial Sequence
  cleavable linker
IFVRLRGS

SEQ ID NO: 1675 - protein, 8 aa, Artificial Sequence
  cleavable linker
ILFNIKGS

SEQ ID NO: 1676 - protein, 8 aa, Artificial Sequence
  cleavable linker
LFAAPFGS

SEQ ID NO: 1677 - protein, 8 aa, Artificial Sequence
  cleavable linker
LFVALKGS

SEQ ID NO: 1678 - protein, 7 aa, Artificial Sequence
  cleavable linker
LFVLKGS

SEQ ID NO: 1679 - protein, 7 aa, Artificial Sequence
  cleavable linker
LFVLRGS

SEQ ID NO: 1680 - protein, 6 aa, Artificial Sequence
  cleavable linker
LFVRGS

SEQ ID NO: 1681 - protein, 8 aa, Artificial Sequence
  cleavable linker
LFVRLRGS

SEQ ID NO: 1682 - protein, 9 aa, Artificial Sequence
  cleavable linker
LFVRVFLGS

SEQ ID NO: 1683 - protein, 6 aa, Artificial Sequence
  cleavable linker
LGERGS

SEQ ID NO: 1684 - protein, 7 aa, Artificial Sequence
  cleavable linker
LKALFGS

SEQ ID NO: 1685 - protein, 6 aa, Artificial Sequence
  cleavable linker
LKFFGS

SEQ ID NO: 1686 - protein, 7 aa, Artificial Sequence
  cleavable linker
LKIFVGS

SEQ ID NO: 1687 - protein, 7 aa, Artificial Sequence
  cleavable linker
LKLFVGS

SEQ ID NO: 1688 - protein, 7 aa, Artificial Sequence
  cleavable linker
LRALFGS

SEQ ID NO: 1689 - protein, 6 aa, Artificial Sequence
  cleavable linker
LRFFGS

SEQ ID NO: 1690 - protein, 7 aa, Artificial Sequence
  cleavable linker
LRIFVGS

SEQ ID NO: 1691 - protein, 7 aa, Artificial Sequence
  cleavable linker
LRLFVGS

SEQ ID NO: 1692 - protein, 6 aa, Artificial Sequence
  cleavable linker
RALFGS

SEQ ID NO: 1693 - protein, 6 aa, Artificial Sequence
  cleavable linker
RIFVGS

SEQ ID NO: 1694 - protein, 6 aa, Artificial Sequence
  cleavable linker
RLFVGS

SEQ ID NO: 1695 - protein, 8 aa, Artificial Sequence
  cleavable linker
RLRALFGS

SEQ ID NO: 1696 - protein, 7 aa, Artificial Sequence
  cleavable linker
RLRFFGS

SEQ ID NO: 1697 - protein, 8 aa, Artificial Sequence
  cleavable linker
RLRIFVGS

SEQ ID NO: 1698 - protein, 8 aa, Artificial Sequence
  cleavable linker
RLRLFVGS

SEQ ID NO: 1699 - protein, 8 aa, Artificial Sequence
  cleavable linker
RRKAFVGS

SEQ ID NO: 1700 - protein, 8 aa, Artificial Sequence
  cleavable linker
RRKLIFGS

SEQ ID NO: 1701 - protein, 8 aa, Artificial Sequence
  cleavable linker
RRRFFAGS

SEQ ID NO: 1702 - protein, 8 aa, Artificial Sequence
  cleavable linker
VFGRKGGS

SEQ ID NO: 1703 - protein, 7 aa, Artificial Sequence
  cleavable linker
YFVRKGS

SEQ ID NO: 1704 - protein, 8 aa, Artificial Sequence
  cleavable linker
GSAFVRLF

SEQ ID NO: 1705 - protein, 7 aa, Artificial Sequence
  cleavable linker
GSAKLFV

SEQ ID NO: 1706 - protein, 8 aa, Artificial Sequence
  cleavable linker
GSALFALK

SEQ ID NO: 1707 - protein, 7 aa, Artificial Sequence
  cleavable linker
GSALFLK

SEQ ID NO: 1708 - protein, 7 aa, Artificial Sequence
  cleavable linker
GSALFLR

SEQ ID NO: 1709 - protein, 6 aa, Artificial Sequence
  cleavable linker
GSALFR

SEQ ID NO: 1710 - protein, 8 aa, Artificial Sequence
  cleavable linker
GSALFRLR

SEQ ID NO: 1711 - protein, 8 aa, Artificial Sequence
  cleavable linker
GSALKALF

SEQ ID NO: 1712 - protein, 7 aa, Artificial Sequence
  cleavable linker
GSALKFF

SEQ ID NO: 1713 - protein, 8 aa, Artificial Sequence
  cleavable linker
GSALKFLV

SEQ ID NO: 1714 - protein, 8 aa, Artificial Sequence
  cleavable linker
GSALKIFV

SEQ ID NO: 1715 - protein, 8 aa, Artificial Sequence
  cleavable linker
GSALKLFV

SEQ ID NO: 1716 - protein, 8 aa, Artificial Sequence
  cleavable linker
GSFFADIK

SEQ ID NO: 1717 - protein, 7 aa, Artificial Sequence
  cleavable linker
GSFFALK

SEQ ID NO: 1718 - protein, 6 aa, Artificial Sequence
  cleavable linker
GSFFLK

SEQ ID NO: 1719 - protein, 6 aa, Artificial Sequence
  cleavable linker
GSFFLR

SEQ ID NO: 1720 - protein, 7 aa, Artificial Sequence
  cleavable linker
GSFFRLR

SEQ ID NO: 1721 - protein, 8 aa, Artificial Sequence
  cleavable linker
GSFGYRIK

SEQ ID NO: 1722 - protein, 7 aa, Artificial Sequence
  cleavable linker
GSFLRLF

SEQ ID NO: 1723 - protein, 7 aa, Artificial Sequence
  cleavable linker
GSFYARR

SEQ ID NO: 1724 - protein, 8 aa, Artificial Sequence
  cleavable linker
GSGGLRKK

SEQ ID NO: 1725 - protein, 8 aa, Artificial Sequence
  cleavable linker
GSIFVALK

SEQ ID NO: 1726 - protein, 7 aa, Artificial Sequence
  cleavable linker
GSIFVLK

SEQ ID NO: 1727 - protein, 7 aa, Artificial Sequence
  cleavable linker
GSIFVLR

SEQ ID NO: 1728 - protein, 6 aa, Artificial Sequence
  cleavable linker
GSIFVR

SEQ ID NO: 1729 - protein, 8 aa, Artificial Sequence
  cleavable linker
GSIFVRLR

SEQ ID NO: 1730 - protein, 8 aa, Artificial Sequence
  cleavable linker
GSILFNIK

SEQ ID NO: 1731 - protein, 8 aa, Artificial Sequence
  cleavable linker
GSLFAAPF

SEQ ID NO: 1732 - protein, 8 aa, Artificial Sequence
  cleavable linker
GSLFVALK

SEQ ID NO: 1733 - protein, 7 aa, Artificial Sequence
  cleavable linker
GSLFVLK

SEQ ID NO: 1734 - protein, 7 aa, Artificial Sequence
  cleavable linker
GSLFVLR

SEQ ID NO: 1735 - protein, 6 aa, Artificial Sequence
  cleavable linker
GSLFVR

SEQ ID NO: 1736 - protein, 8 aa, Artificial Sequence
  cleavable linker
GSLFVRLR

SEQ ID NO: 1737 - protein, 9 aa, Artificial Sequence
  cleavable linker
GSLFVRVFL

SEQ ID NO: 1738 - protein, 6 aa, Artificial Sequence
  cleavable linker
GSLGER

SEQ ID NO: 1739 - protein, 7 aa, Artificial Sequence
  cleavable linker
GSLKALF

SEQ ID NO: 1740 - protein, 6 aa, Artificial Sequence
  cleavable linker
GSLKFF

SEQ ID NO: 1741 - protein, 7 aa, Artificial Sequence
  cleavable linker
GSLKIFV

SEQ ID NO: 1742 - protein, 7 aa, Artificial Sequence
  cleavable linker
GSLKLFV

SEQ ID NO: 1743 - protein, 7 aa, Artificial Sequence
  cleavable linker
GSLRALF

SEQ ID NO: 1744 - protein, 6 aa, Artificial Sequence
  cleavable linker
GSLRFF

SEQ ID NO: 1745 - protein, 7 aa, Artificial Sequence
  cleavable linker
GSLRIFV

SEQ ID NO: 1746 - protein, 7 aa, Artificial Sequence
  cleavable linker
GSLRLFV

SEQ ID NO: 1747 - protein, 6 aa, Artificial Sequence
  cleavable linker
GSRALF

SEQ ID NO: 1748 - protein, 6 aa, Artificial Sequence
  cleavable linker
GSRIFV

SEQ ID NO: 1749 - protein, 6 aa, Artificial Sequence
  cleavable linker
GSRLFV

SEQ ID NO: 1750 - protein, 8 aa, Artificial Sequence
  cleavable linker
GSRLRALF

SEQ ID NO: 1751 - protein, 7 aa, Artificial Sequence
  cleavable linker
GSRLRFF

SEQ ID NO: 1752 - protein, 8 aa, Artificial Sequence
  cleavable linker
GSRLRIFV

SEQ ID NO: 1753 - protein, 8 aa, Artificial Sequence
  cleavable linker
GSRLRLFV

SEQ ID NO: 1754 - protein, 8 aa, Artificial Sequence
  cleavable linker
GSRRKAFV

SEQ ID NO: 1755 - protein, 8 aa, Artificial Sequence
  cleavable linker
GSRRKLIF

SEQ ID NO: 1756 - protein, 8 aa, Artificial Sequence
  cleavable linker
GSRRRFFA

SEQ ID NO: 1757 - protein, 8 aa, Artificial Sequence
  cleavable linker
GSVFGRKG

SEQ ID NO: 1758 - protein, 7 aa, Artificial Sequence
  cleavable linker
GSYFVRK

SEQ ID NO: 1759 - protein, 75 aa, Zea mays
QIFVKTLTGKTITLEVESSDTIDNVKAKIQDKEGIPPDQQRLIFAGKQLEDGRTLADYNIQKESTLHLVLRLRGG

SEQ ID NO: 1760 - protein, 10 aa, Artificial Sequence
  his-tag
HHHHHHHHHH

SEQ ID NO: 1761 - protein, 56 aa, Diguetia canities
AKDGDVEGPAGCKKYDVECDSGECCQKQYLWYKWRPLDCRCLKSGFFSSKCVCRDV

SEQ ID NO: 1762 - protein, 76 aa, Apomastus schlingeri
EIPQNLGSGIPHDKIKLPNGQWCKTPGDLCSSSSECCKAKHSNSVTYASFCSRQWSGQQALFINQCRTCNVESSMC

SEQ ID NO: 1763 - protein, 61 aa, Mesobuthus tamulus sindicus
DGYILMRNGCKIPCLFGNDGCNKECKAYGGSYGYCWTYGLACACEGQPEDKKHLNYHKKTC

SEQ ID NO: 1764 - protein, 51 aa, Eratigena agrestis
EPDEICRARMTHKEFNYKSNVCNGCGDQVAACEAECFRNDVYTACHEAQKG

SEQ ID NO: 1765 - protein, 51 aa, Eratigena agrestis
EPDEICRARMTNKEFTYKSNVCNNCGDQVAACEAECFRNDVYTACHEAQKG

SEQ ID NO: 1766 - protein, 39 aa, Calisoga sp.
CISARYPCSNSKDCCSGNCGTFWTCYIRKDPCSKECLAP

SEQ ID NO: 1767 - protein, 61 aa, Androctonus australis
DGYIKRHDGCKVTCLINDNYCDTECKREGGSYGYCYSVGFACWCEGLPDDKAWKSETNTCD

SEQ ID NO: 1768 - protein, 76 aa, Apomastus schlingeri
EIPQNLGSDIPHDIIKLPNGQWCKTPGALCSSRSECCKAKHSDSVTYSSGCSRQWSDQQGLFINQCRTCNVESSMC

SEQ ID NO: 1769 - protein, 64 aa, Hottentotta judaica
GRDAYIADNLNCAYTCGSNSYCNTECTKNGAVSGYCQWLGKYGNACWCINLPDKVPIRIPGACR

SEQ ID NO: 1770 - protein, 61 aa, Leiurus quinquestriatus quinquestriatus
DGYIRKRDGCKVSCLFGNEGCDKECKAYGGSYGYCWIWGLACWCEGLPDDKTWKSETNTCG

SEQ ID NO: 1771 - protein, 61 aa, Leiurus quinquestriatus hebraeus
DGYIRGGDGCKVSCVINHVFCDNECKAAGGSYGYCWAWGLACWCEGLPADREWDYETNTCG

SEQ ID NO: 1772 - protein, 61 aa, Leiurus quinquestriatus hebraeus
DGYIRGGDGCKVSCVINHVFCDNECKAAGGSYGYCWAWGLACWCEGLPAEREWDYETNTCG

SEQ ID NO: 1773 - protein, 61 aa, Leiurus quinquestriatus hebraeus
DGYIRGGDGCKVSCVIDHVFCDNECKAAGGSYGYCWGWGLACWCEGLPADREWKYETNTCG

SEQ ID NO: 1774 - protein, 41 aa, Brachypelma smithii
CLGENVPCDKDRPNCCSRYECLEPTGYGWWYASYYCYKKRS

SEQ ID NO: 1775 - protein, 46 aa, Plectreurys tristis
AVKCIGWQETCNGNLPCCNECVMCECNIMGQNCRCNHPKATNECES

SEQ ID NO: 1776 - protein, 37 aa, Hadronyche versuta; identical to SEQ ID NO: 1113

SEQ ID NO: 1777 - protein, 78 aa, Atrax robustus; identical to SEQ ID NO: 592

SEQ ID NO: 1778 - protein, 49 aa, Phoneutria nigriventer
GSCADINGACKSDCDCCGDSVTCDCYWSDSCKCRESNFKIGMAIRKKFC

SEQ ID NO: 1779 - protein, 47 aa, Anemonia viridis; identical to SEQ ID NO: 1237

SEQ ID NO: 1780 - protein, 27 aa, Anemonia viridis
RSCCPCYWGGCPWGQNCYPEGCSGPKV

SEQ ID NO: 1781 - protein, 27 aa, Anemonia viridis
KSCCPCYWGGCPWGQNCYPEGCSGPKV

SEQ ID NO: 1782 - protein, 26 aa, Anemonia viridis
KSCCPCYWGGCPWGQNCYPEGCSGPK

1. A mixture comprising two types of insecticidal peptides, wherein the first type of insecticidal peptide is a Pore Forming Insecticidal Protein (PFIP), and the second type of insecticidal peptide is a Cysteine Rich Insecticidal Peptide (CRIP), wherein the PFIP and CRIP are not fused together.

2. The mixture of claim 1, wherein the PFIP is a Bacillus thuringiensis (Bt) toxin.

3. The mixture of claim 2, wherein the Bt toxin is a parasporal crystal toxin, a secreted protein, a β-exotoxin, a 41.9-kDa insecticidal toxin, a sphaericolysin, an alveolysin, or an enhancin-like protein.

4. The mixture of claim 3, wherein the parasporal crystal toxin is a δ-endotoxin.

5. The mixture of claim 4, wherein the δ-endotoxin is a Three-domain (3D) Cry family protein, a binary Bin-like family toxin, an ETX_MTX2-like family toxin, a Toxin-10 family toxin, an Aerolysin family toxin, or a cytolysin.

6. The mixture of claim 5, wherein the δ-endotoxin is a Three-domain (3D) Cry toxin, a mosquitocidal Cry toxin (Mtx), a binary-like (Bin) toxin, or a Cyt toxin.

7. The mixture of claim 6, wherein the δ-endotoxin is a Three-domain (3D) Cry toxin or a Cyt toxin.

8. The mixture of claim 7, wherein the δ-endotoxin is selected from the group consisting of: Cry1Aa1, Cry1Aa2, Cry1Aa3, Cry1Aa4, Cry1Aa5, Cry1Aa6, Cry1Aa7, Cry1Aa8, Cry1Aa9, Cry1Aa10, Cry1Aa11, Cry1Aa12, Cry1Aa13, Cry1Aa14, Cry1Aa15, Cry1Aa16, Cry1Aa17, Cry1Aa18, Cry1Aa19, Cry1Aa20, Cry1Aa21, Cry1Aa22, Cry1Aa23, Cry1Aa24, Cry1Aa25, Cry1Ab1, Cry1Ab2, Cry1Ab3, Cry1Ab4, Cry1Ab5, Cry1Ab6, Cry1Ab7, Cry1Ab8, Cry1Ab9, Cry1Ab10, Cry1Ab1, Cry1Ab12, Cry1Ab13, Cry1Ab14, Cry1Ab15, Cry1Ab16, Cry1Ab17, Cry1Ab18, Cry1Ab19, Cry1Ab20, Cry1Ab21, Cry1Ab22, Cry1Ab23, Cry1Ab24, Cry1Ab25, Cry1Ab26, Cry1Ab27, Cry1Ab28, Cry1Ab29, Cry1Ab30, Cry1Ab31, Cry1Ab32, Cry1Ab33, Cry1Ab34, Cry1Ab35, Cry1Ab36, Cry1Ab-like, Cry1Ab-like, Cry1Ab-like, Cry1Ab-like, Cry1Ac1, Cry1Ac2, Cry1Ac3, Cry1Ac4, Cry1Ac5, Cry1Ac6, Cry1Ac7, Cry1Ac8, Cry1Ac9, Cry1Ac10, Cry1Ac11, Cry1Ac12, Cry1Ac13, Cry1Ac14, Cry1Ac15, Cry1Ac16, Cry1Ac17, Cry1Ac18, Cry1Ac19, Cry1Ac20, Cry1Ac21, Cry1Ac22, Cry1Ac23, Cry1Ac24, Cry1Ac25, Cry1Ac26, Cry1Ac27, Cry1Ac28, Cry1Ac29, Cry1Ac30, Cry1Ac31, Cry1Ac32, Cry1Ac33, Cry1Ac34, Cry1Ac35, Cry1Ac36, Cry1Ac37, Cry1Ac38, Cry1Ac39, Cry1Ad1, Cry1Ad2, Cry1Ae1, Cry1Af1, Cry1Ag1, Cry1Ah1, Cry1Ah2, Cry1Ah3, Cry1Ai1, Cry1Ai2, Cry1Aj1, Cry1A-like, Cry1Ba1, Cry1Ba2, Cry1Ba3, Cry1Ba4, Cry1Ba5, Cry1Ba6, Cry1Ba7, Cry1Ba8, Cry1Bb1, Cry1Bb2, Cry1Bb3, Cry1Bc1, Cry1Bd1, Cry1Bd2, Cry1Bd3, Cry1Be1, Cry1Be2, Cry1Be3, Cry1Be4, Cry1Be5, Cry1Bf1, Cry1Bf2, Cry1Bg1, Cry1Bh1, Cry1Bi1, Cry1Bj1, Cry1Ca1, Cry1Ca2, Cry1Ca3, Cry1Ca4, Cry1Ca5, Cry1Ca6, Cry1Ca7, Cry1Ca8, Cry1Ca9, Cry1Ca10, Cry1Ca11, Cry1Ca12, Cry1Ca13, Cry1Ca14, Cry1Ca15, Cry1Cb1, Cry1Cb2, Cry1Cb3, Cry1Cb-like, Cry1Da1, Cry1Da2, Cry1Da3, Cry1Da4, Cry1Da5, Cry1Db1, Cry1Db2, Cry1Dc1, Cry1Dd1, Cry1Ea1, Cry1Ea2, Cry1Ea3, Cry1Ea4, Cry1Ea5, Cry1Ea6, Cry1Ea7, Cry1Ea8, Cry1Ea9, Cry1Ea10, Cry1Ea11, Cry1Ea12, Cry1Eb1, Cry1Fa1, Cry1Fa2, Cry1Fa3, Cry1Fa4, Cry1Fb1, Cry1Fb2, Cry1Fb3, Cry1Fb4, Cry1Fb5, Cry1Fb6, Cry1Fb7, Cry1Ga1, Cry1Ga2, Cry1Gb1, Cry1Gb2, Cry1Gc1, Cry1Ha1, Cry1Hb1, Cry1Hb2, Cry1Hc1, Cry1H-like, Cry1Ia1, Cry1Ia2, Cry1Ia3, Cry1Ia4, Cry1Ia5, Cry1Ia6, Cry1Ia7, Cry1Ia8, Cry1Ia9, Cry1Ia10, Cry1Ia11, Cry1Ia12, Cry1Ia13, Cry1Ia14, Cry1Ia15, Cry1Ia16, Cry1Ia17, Cry1Ia18, Cry1Ia19, Cry1Ia20, Cry1Ia21, Cry1Ia22, Cry1Ia23, Cry1Ia24, Cry1Ia25, Cry1Ia26, Cry1Ia27, Cry1Ia28, Cry1Ia29, Cry1Ia30, Cry1Ia31, Cry1Ia32, Cry1Ia33, Cry1Ia34, Cry1Ia35, Cry1Ia36, Cry1Ia37, Cry1Ia38, Cry1Ia39, Cry1Ia40, Cry1Ib1, Cry1Ib2, Cry1Ib3, Cry1Ib4, Cry1Ib5, Cry1Ib6, Cry1Ib7, Cry1Ib8, Cry1Ib9, Cry1Ib10, Cry1Ib11, Cry1Ic1, Cry1Ic2, Cry1Id1, Cry1Id2, Cry1Id3, Cry1Ie1, Cry1Ie2, Cry1Ie3, Cry1Ie4, Cry1Ie5, Cry1If1, Cry1Ig1, Cry1I-like, Cry1I-like, Cry1Ja1, Cry1Ja2, Cry1Ja3, Cry1Jb1, Cry1Jc1, Cry1Jc2, Cry1Jd1, Cry1Ka1, Cry1Ka2, Cry1La1, Cry1La2, Cry1La3, Cry1Ma1, Cry1Ma2, Cry1Na1, Cry1Na2, Cry1Na3, Cry1Nb1, Cry1-like, Cry2Aa1, Cry2Aa2, Cry2Aa3, Cry2Aa4, Cry2Aa5, Cry2Aa6, Cry2Aa7, Cry2Aa8, Cry2Aa9, Cry2Aa10, Cry2Aa11, Cry2Aa12, Cry2Aa13, Cry2Aa14, Cry2Aa15, Cry2Aa16, Cry2Aa17, Cry2Aa18, Cry2Aa19, Cry2Aa20, Cry2Aa21, Cry2Aa22, Cry2Aa23, Cry2Aa23, Cry2Aa25, Cry2Ab1, Cry2Ab2, Cry2Ab3, Cry2Ab4, Cry2Ab5, Cry2Ab6, Cry2Ab7, Cry2Ab8, Cry2Ab9, Cry2Ab10, Cry2Ab11, Cry2Ab12, Cry2Ab13, Cry2Ab14, Cry2Ab15, Cry2Ab16, Cry2Ab17, Cry2Ab18, Cry2Ab19, Cry2Ab20, Cry2Ab21, Cry2Ab22, Cry2Ab23, Cry2Ab24, Cry2Ab25, Cry2Ab26, Cry2Ab27, Cry2Ab28, Cry2Ab29, Cry2Ab30, Cry2Ab31, Cry2Ab32, Cry2Ab33, Cry2Ab34, Cry2Ab35, Cry2Ab36, Cry2Ac1, Cry2Ac2, Cry2Ac3, Cry2Ac4, Cry2Ac5, Cry2Ac6, Cry2Ac7, Cry2Ac8, Cry2Ac9, Cry2Ac10, Cry2Ac11, Cry2Ac12, Cry2Ad1, Cry2Ad2, Cry2Ad3, Cry2Ad4, Cry2Ad5, Cry2Ae1, Cry2Af1, Cry2Af2, Cry2Ag1, Cry2Ah1, Cry2Ah2, Cry2Ah3, Cry2Ah4, Cry2Ah5, Cry2Ah6, Cry2Ai1, Cry2Aj1, Cry2Ak1, Cry2Al1, Cry2Ba1, Cry2Ba2, Cry3Aa1, Cry3Aa2, Cry3Aa3, Cry3Aa4, Cry3Aa5, Cry3Aa6, Cry3Aa7, Cry3Aa8, Cry3Aa9, Cry3Aa10, Cry3Aa11, Cry3Aa12, Cry3Ba1, Cry3Ba2, Cry3Ba3, Cry3Bb1, Cry3Bb2, Cry3Bb3, Cry3Ca1, Cry4Aa1, Cry4Aa2, Cry4Aa3, Cry4Aa4, Cry4A-like, Cry4Ba1, Cry4Ba2, Cry4Ba3, Cry4Ba4, Cry4Ba5, Cry4Ba-like, Cry4Ca1, Cry4Ca2, Cry4Cb1, Cry4Cb2, Cry4Cb3, Cry4Cc1, Cry5Aa1, Cry5Ab1, Cry5Ac1, Cry5Ad1, Cry5Ba1, Cry5Ba2, Cry5Ba3, Cry5Ca1, Cry5Ca2, Cry5Da1, Cry5Da2, Cry5Ea1, Cry5Ea2, Cry6Aa1, Cry6Aa2, Cry6Aa3, Cry6Ba1, Cry7Aa1, Cry7Aa2, Cry7Ab1, Cry7Ab2, Cry7Ab3, Cry7Ab4, Cry7Ab5, Cry7Ab6, Cry7Ab7, Cry7Ab8, Cry7Ab9, Cry7Ac1, Cry7Ba1, Cry7Bb1, Cry7Ca1, Cry7Cb1, Cry7Da1, Cry7Da2, Cry7Da3, Cry7Ea1, Cry7Ea2, Cry7Ea3, Cry7Fa1, Cry7Fa2, Cry7Fb1, Cry7Fb2, Cry7Fb3, Cry7Ga1, Cry7Ga2, Cry7Gb1, Cry7Gc1, Cry7Gd1, Cry7Ha1, Cry7Ia1, Cry7Ja1, Cry7Ka1, Cry7Kb1, Cry7La1, Cry8Aa1, Cry8Ab1, Cry8Ac1, Cry8Ad1, Cry8Ba1, Cry8Bb1, Cry8Bc1, Cry8Ca1, Cry8Ca2, Cry8Ca3, Cry8Ca4, Cry8Ca5, Cry8Da1, Cry8Da2, Cry8Da3, Cry8Db1, Cry8Ea1, Cry8Ea2, Cry8Ea3, Cry8Ea4, Cry8Ea5, Cry8Ea6, Cry8Fa1, Cry8Fa2, Cry8Fa3, Cry8Fa4, Cry8Ga1, Cry8Ga2, Cry8Ga3, Cry8Ha1, Cry8Hb1, Cry8Ia1, Cry8Ia2, Cry8Ia3, Cry8Ia4, Cry8Ib1, Cry8Ib2, Cry8Ib3, Cry8Ja1, Cry8Ka1, Cry8Ka2, Cry8Ka3, Cry8Kb1, Cry8Kb2, Cry8Kb3, Cry8La1, Cry8Ma1, Cry8Ma2, Cry8Ma3, Cry8Na1, Cry8Pa1, Cry8Pa2, Cry8Pa3, Cry8Qa1, Cry8Qa2, Cry8Ra1, Cry8Sa1, Cry8Ta1, Cry8-like, Cry8-like, Cry9Aa1, Cry9Aa2, Cry9Aa3, Cry9Aa4, Cry9Aa5, Cry9Aa, like, Cry9Ba1, Cry9Ba2, Cry9Bb1, Cry9Ca1, Cry9Ca2, Cry9Cb1, Cry9Da1, Cry9Da2, Cry9Da3, Cry9Da4, Cry9Db1, Cry9Dc1, Cry9Ea1, Cry9Ea2, Cry9Ea3, Cry9Ea4, Cry9Ea5, Cry9Ea6, Cry9Ea7, Cry9Ea8, Cry9Ea9, Cry9Ea10, Cry9Ea11, Cry9Eb1, Cry9Eb2, Cry9Eb3, Cry9Ec1, Cry9Ed1, Cry9Ee1, Cry9Ee2, Cry9Fa1, Cry9Ga1, Cry9-like, Cry10Aa1, Cry10Aa2, Cry10Aa3, Cry10Aa4, Cry10A-like, Cry11Aa1, Cry11Aa2, Cry11Aa3, Cry11Aa4, Cry11Aa5, Cry11Aa-like, Cry11Ba1, Cry11Bb1, Cry11Bb2, Cry12Aa1, Cry13Aa1, Cry13Aa2, Cry14Aa1, Cry14Ab1, Cry15Aa1, Cry16Aa1, Cry17Aa1, Cry18Aa1, Cry18Ba1, Cry18Ca1, Cry19Aa1, Cry19Ba1, Cry19Ca1, Cry20Aa1, Cry20Ba1, Cry20Ba2, Cry20-like, Cry21Aa1, Cry21Aa2, Cry21Aa3, Cry21Ba1, Cry21Ca1, Cry21Ca2, Cry21Da1, Cry21Ea1, Cry21Fa1, Cry21Ga1, Cry21Ha1, Cry22Aa1, Cry22Aa2, Cry22Aa3, Cry22Ab1, Cry22Ab2, Cry22Ba1, Cry22Bb1, Cry23Aa1, Cry24Aa1, Cry24Ba1, Cry24Ca1, Cry24Da1, Cry25Aa1, Cry26Aa1, Cry27Aa1, Cry28Aa1, Cry28Aa2, Cry29Aa1, Cry29Ba1, Cry30Aa1, Cry30Ba1, Cry30Ca1, Cry30Ca2, Cry30Da1, Cry30Db1, Cry30Ea1, Cry30Ea2, Cry30Ea3, Cry30Ea4, Cry30Fa1, Cry30Ga1, Cry30Ga2, Cry31Aa1, Cry31Aa2, Cry31Aa3, Cry31Aa4, Cry31Aa5, Cry31Aa6, Cry31Ab1, Cry31Ab2, Cry31Ac1, Cry31Ac2, Cry31Ad1, Cry31Ad2, Cry32Aa1, Cry32Aa2, Cry32Ab1, Cry32Ba1, Cry32Ca1, Cry32Cb1, Cry32Da1, Cry32Ea1, Cry32Ea2, Cry32Eb1, Cry32Fa1, Cry32Ga1, Cry32Ha1, Cry32Hb1, Cry32Ja1, Cry32Ja1, Cry32Ka1, Cry32La1, Cry32Ma1, Cry32Mb1, Cry32Na1, Cry32Oa1, Cry32Pa1, Cry32Qa1, Cry32Ra1, Cry32Sa1, Cry32Ta1, Cry32Ua1, Cry32Va1, Cry32Wa1, Cry32Wa2, Cry32Xa1, Cry32Ya1, Cry33Aa1, Cry34Aa1, Cry34Aa2, Cry34Aa3, Cry34Aa4, Cry34Ab1, Cry34Ac1, Cry34Ac2, Cry34Ac3, Cry34Ba1, Cry34Ba2, Cry34Ba3, Cry35Aa1, Cry35Aa2, Cry35Aa3, Cry35Aa4, Cry35Ab1, Cry35Ab2, Cry35Ab3, Cry35Ac1, Cry35Ba1, Cry35Ba2, Cry35Ba3, Cry36Aa1, Cry37Aa1, Cry38Aa1, Cry39Aa1, Cry40Aa1, Cry40Ba1, Cry40Ca1, Cry40Da1, Cry41Aa1, Cry41Ab1, Cry41Ba1, Cry41Ba2, Cry41Ca1, Cry42Aa1, Cry43Aa1, Cry43Aa2, Cry43Ba1, Cry43Ca1, Cry43Cb1, Cry43Cc1, Cry43-like, Cry44Aa1, Cry45Aa1, Cry45Ba1, Cry46Aa1, Cry46Aa2, Cry46Ab1, Cry47Aa1, Cry48Aa1, Cry48Aa2, Cry48Aa3, Cry48Ab1, Cry48Ab2, Cry49Aa1, Cry49Aa2, Cry49Aa3, Cry49Aa4, Cry49Ab1, Cry50Aa1, Cry50Ba1, Cry50Ba2, Cry51Aa1, Cry51Aa2, Cry52Aa1, Cry52Ba1, Cry52Ca1, Cry53Aa1, Cry53Ab1, Cry54Aa1, Cry54Aa2, Cry54Ab1, Cry54Ba1, Cry54Ba2, Cry55Aa1, Cry55Aa2, Cry55Aa3, Cry56Aa1, Cry56Aa2, Cry56Aa3, Cry56Aa4, Cry57Aa1, Cry57Ab1, Cry58Aa1, Cry59Ba1, Cry59Aa1, Cry60Aa1, Cry60Aa2, Cry60Aa3, Cry60Ba1, Cry60Ba2, Cry60Ba3, Cry61Aa1, Cry61Aa2, Cry61Aa3, Cry62Aa1, Cry63Aa1, Cry64Aa1, Cry64Ba1, Cry64Ca1, Cry65Aa1, Cry65Aa2, Cry66Aa1, Cry66Aa2, Cry67Aa1, Cry67Aa2, Cry68Aa1, Cry69Aa1, Cry69Aa2, Cry69Ab11, Cry70Aa1, Cry70Ba1, Cry70Bb1, Cry71Aa1, Cry72Aa1, Cry72Aa2, Cry73Aa1, Cry74Aa, Cry75Aa1, Cry75Aa2, Cry75Aa3, Cry76Aa1, Cry77Aa1, or Cry78Aa1, Cyt1Aa1, Cyt1Aa2, Cyt1Aa3, Cyt1Aa4, Cyt1Aa5, Cyt1Aa6, Cyt1Aa7, Cyt1Aa8, Cyt1Aa-like, Cyt1Ab1, Cyt1Ba1, Cyt1Ca1, Cyt1Da1, Cyt1Da2, Cyt2Aa1, Cyt2Aa2, Cyt2Aa3, Cyt2Aa4, Cyt2Ba1, Cyt2Ba2, Cyt2Ba3, Cyt2Ba4, Cyt2Ba5, Cyt2Ba6, Cyt2Ba7, Cyt2Ba8, Cyt2Ba9, Cyt2Ba10, Cyt2Ba11, Cyt2Ba12, Cyt2Ba13, Cyt2Ba14, Cyt2Ba15, Cyt2Ba16, Cyt2Ba-like, Cyt2Bb1, Cyt2Bc1, Cyt2B-like, Cyt2Ca1, and Cyt3Aa1.

9. The mixture of claim 8, wherein the Cry toxin or Cyt toxin has an amino acid sequence according to SEQ ID NOs: 1366-1446.

10. The mixture of claim 3, wherein the Bt toxin is a secreted protein.

11. The mixture of claim 10, wherein the secreted protein is a vegetative insecticidal proteins (Vip), a secreted insecticidal protein (Sip), a Bin-like family protein, or an ETX_MTX2-family protein.

12. The mixture of claim 11, wherein the secreted protein is a Vip.

13. The mixture of claim 12, wherein the Vip is a Vip 1 family protein, a Vip 2 family protein, a Vip 3 family protein, or a Vip 4 family protein.

14. The mixture of claim 13, wherein the Vip is selected from the group consisting of: Vip1Aa1, Vip1Aa2, Vip1Aa3, Vip1Ab1, Vip1Ac1, Vip1Ad1, Vip1Ba1, Vip1Ba2, Vip1Bb1, Vip1Bb2, Vip1Bb3, Vip1Bc1, Vip1Ca1, Vip1Ca2, Vip1Da1, Vip2Aa1, Vip2Aa2, Vip2Aa3, Vip2Ab1, Vip2Ac1, Vip2Ac2, Vip2Ad1, Vip2Ae1, Vip2Ae2, Vip2Ae3, Vip2Af1, Vip2Af2, Vip2Ag1, Vip2Ag2, Vip2Ba1, Vip2Ba2, Vip2Bb1, Vip2Bb2, Vip2Bb3, Vip2Bb4, Vip3Aa1, Vip3Aa2, Vip3Aa3, Vip3Aa4, Vip3Aa5, Vip3Aa6, Vip3Aa7, Vip3Aa8, Vip3Aa9, Vip3Aa10, Vip3Aa11, Vip3Aa12, Vip3Aa13, Vip3Aa14, Vip3Aa15, Vip3Aa16, Vip3Aa17, Vip3Aa18, Vip3Aa19.0, Vip3Aa19, Vip3Aa20, Vip3Aa21, Vip3Aa22, Vip3Aa23, Vip3Aa24, Vip3Aa25, Vip3Aa26, Vip3Aa27, Vip3Aa28, Vip3Aa29, Vip3Aa30, Vip3Aa31, Vip3Aa32, Vip3Aa33, Vip3Aa34, Vip3Aa35, Vip3Aa36, Vip3Aa37, Vip3Aa38, Vip3Aa39, Vip3Aa40, Vip3Aa41, Vip3Aa42, Vip3Aa43, Vip3Aa44, Vip3Aa45, Vip3Aa46, Vip3Aa47, Vip3Aa48, Vip3Aa49, Vip3Aa50, Vip3Aa51, Vip3Aa52, Vip3Aa53, Vip3Aa54, Vip3Aa55, Vip3Aa56, Vip3Aa57, Vip3Aa58, Vip3Aa59, Vip3Aa60, Vip3Aa61, Vip3Aa62, Vip3Aa63, Vip3Aa64, Vip3Aa65, Vip3Aa66, Vip3Ab1, Vip3Ab2, Vip3Ac1, Vip3Ad1, Vip3Ad2, Vip3Ad3, Vip3Ad4, Vip3Ad5, Vip3Ad6, Vip3Ae1, Vip3Af1, Vip3Af2, Vip3Af3, Vip3Af4, Vip3Ag1, Vip3Ag2, Vip3Ag3, Vip3Ag4, Vip3Ag5, Vip3Ag6, Vip3Ag7, Vip3Ag8, Vip3Ag9, Vip3Ag10, Vip3Ag11, Vip3Ag12, Vip3Ag13, Vip3Ag14, Vip3Ag15, Vip3Ah1, Vip3Ah2, Vip3Ai1, Vip3Aj1, Vip3Aj2, Vip3Ba1, Vip3Ba2, Vip3Bb1, Vip3Bb2, Vip3Bb3, Vip3Bc, Vip3Ca1, Vip3Ca2, Vip3Ca3, Vip3Ca4, and Vip4Aa1.

15. The mixture of claim 14, wherein the Vip protein has an amino acid sequence according to the amino acid sequence set forth in SEQ ID NOs: 1447-1552.

16. The mixture of claim 2, wherein the Bt toxin is selected from the group consisting of: Bacillus thuringiensis var. israelensis (Bti) toxin; Bacillus thuringiensis var. kurstaki (Btk) toxin; Bacillus thuringiensis var. tenebrionis (Btt) toxin; Bacillus thuringiensis var. aizawai toxin; Bacillus thuringiensis var. aizawai/pacificus toxin; Bacillus thuringiensis var. alesti toxin; Bacillus thuringiensis var. amagiensis toxin; Bacillus thuringiensis var. andalousiensis toxin; Bacillus thuringiensis var. argentinensis toxin; Bacillus thuringiensis var. asturiensis toxin;
Bacillus thuringiensis var. azorensis toxin; Bacillus thuringiensis var. balearica toxin; Bacillus thuringiensis var. berliner toxin; Bacillus thuringiensis var. bolivia toxin; Bacillus thuringiensis var. brasilensis toxin; Bacillus thuringiensis var. cameroun toxin; Bacillus thuringiensis var. canadensis toxin; Bacillus thuringiensis var. chanpaisis toxin; Bacillus thuringiensis var. chinensis toxin; Bacillus thuringiensis var. colmeri toxin; Bacillus thuringiensis var. coreanensis toxin; Bacillus thuringiensis var. dakota toxin; Bacillus thuringiensis var. darmstadiensis toxin; Bacillus thuringiensis var. dendrolimus toxin; Bacillus thuringiensis var. entomocidus toxin; Bacillus thuringiensis var. entomocidus/subtoxicus toxin; Bacillus thuringiensis var. finitimus toxin; Bacillus thuringiensis var. fukuokaensis toxin; Bacillus thuringiensis var. galechiae toxin; Bacillus thuringiensis var. galleriae toxin; Bacillus thuringiensis var. graciosensis toxin; Bacillus thuringiensis var. guiyangiensis toxin; Bacillus thuringiensis var. higo toxin; Bacillus thuringiensis var. huazhongensis toxin; Bacillus thuringiensis var. iberica toxin; Bacillus thuringiensis var. indiana toxin; Bacillus thuringiensis var. israelensis/tochigiensis toxin; Bacillus thuringiensis var. japonensis toxin; Bacillus thuringiensis var. jegathesan toxin; Bacillus thuringiensis var. jinghongiensis toxin; Bacillus thuringiensis var. kenyae toxin; Bacillus thuringiensis var. kim toxin; Bacillus thuringiensis var. kumamtoensis toxin; Bacillus thuringiensis var. kunthalanags3 toxin; Bacillus thuringiensis var. kunthalaRX24 toxin; Bacillus thuringiensis var. kunthalaRX27 toxin; Bacillus thuringiensis var. kunthalaRX28 toxin; Bacillus thuringiensis var. kyushuensis toxin; Bacillus thuringiensis var. leesis toxin; Bacillus thuringiensis var. londrina toxin; Bacillus thuringiensis var. malayensis toxin; Bacillus thuringiensis var. medellin toxin; Bacillus thuringiensis var. mexicanensis toxin; Bacillus thuringiensis var. mogi toxin; Bacillus thuringiensis var. monterrey toxin; Bacillus thuringiensis var. morrisoni toxin; Bacillus thuringiensis var. muju toxin; Bacillus thuringiensis var. navarrensis toxin; Bacillus thuringiensis var. neoleonensis toxin; Bacillus thuringiensis var. nigeriensis toxin; Bacillus thuringiensis var. novosibirsk toxin; Bacillus thuringiensis var. ostriniae toxin; Bacillus thuringiensis var. oswaldocruzi toxin; Bacillus thuringiensis var. pahangi toxin; Bacillus thuringiensis var. pakistani toxin; Bacillus thuringiensis var. palmanyolensis toxin; Bacillus thuringiensis var. pingluonsis toxin; Bacillus thuringiensis var. pirenaica toxin; Bacillus thuringiensis var. poloniensis toxin; Bacillus thuringiensis var. pondicheriensis toxin; Bacillus thuringiensis var. pulsiensis toxin; Bacillus thuringiensis var. rongseni toxin; Bacillus thuringiensis var. roskildiensis toxin; Bacillus thuringiensis var. san diego toxin; Bacillus thuringiensis var. seoulensis toxin; Bacillus thuringiensis var. shandongiensis toxin; Bacillus thuringiensis var. silo toxin; Bacillus thuringiensis var. sinensis toxin; Bacillus thuringiensis var. sooncheon toxin; Bacillus thuringiensis var. sotto toxin; Bacillus thuringiensis var. sotto/dendrolimus toxin; Bacillus thuringiensis var. subtoxicus toxin; Bacillus thuringiensis var. sumiyoshiensis toxin; Bacillus thuringiensis var. sylvestriensis toxin; Bacillus thuringiensis var. thailandensis toxin; Bacillus thuringiensis var. thompsoni toxin; Bacillus thuringiensis var. thuringiensis toxin; Bacillus thuringiensis var. tochigiensis toxin; Bacillus thuringiensis var. toguchini toxin; Bacillus thuringiensis var. tohokuensis toxin; Bacillus thuringiensis var. tolworthi toxin; Bacillus thuringiensis var. toumanoffi toxin; Bacillus thuringiensis var. vazensis toxin; Bacillus thuringiensis var. wratislaviensis toxin; Bacillus thuringiensis var. wuhanensis toxin; Bacillus thuringiensis var. xiaguangiensis toxin; Bacillus thuringiensis var. yosoo toxin; Bacillus thuringiensis var. yunnanensis toxin; Bacillus thuringiensis var. zhaodongensis toxin; and Bacillus thuringiensis var. konkukian toxin.

17. The mixture of claim 1, wherein the PFIP is a Bacillus thuringiensis (Bt) toxin.

18. The mixture of claim 17, wherein the Bt toxin is a Bacillus thuringiensis var. israelensis (Bti) toxin.

19. The mixture of claim 18, wherein Bti toxin is a Bacillus thuringiensis ssp. israelensis Strain BMP 144 Bti toxin.

20. The mixture of claim 17, wherein the Bt toxin is a Bacillus thuringiensis var. kurstaki (Btk) toxin.

21. The mixture of claim 20, wherein Btk toxin is a Bacillus thuringiensis ssp. kurstaki strain EVB-113-19 Btk toxin.

22. The mixture of claim 17, wherein the Bt toxin is a Bacillus thuringiensis var. tenebrionis (Btt) toxin.

23. The mixture of claim 22, wherein Btt toxin is a Bacillus thuringiensis ssp. tenebrionis strain NB-176 Btt toxin.

24. The mixture of any one of claims 1-23, wherein the CRIP is an atracotoxin (ACTX), a ctenitoxin (CNTX), an Av2 toxin, an Av3 toxin, or an Av3-Variant Polypeptide (AVP).

25. The mixture of claim 24, wherein the CRIP is an ACTX.

26. The mixture of claim 25, wherein the ACTX is a U-ACTX peptide, an Omega-ACTX peptides, a Kappa-ACTX peptide, or a variant thereof.

27. The mixture of claim 26, wherein the ACTX is a U-ACTX-Hv1a, a U+2-ACTX-Hv1a, a rU-ACTX-Hv1a, a rU-ACTX-Hv1b, a rκ-ACTX-Hv1c, a ω-ACTX-Hv1a, a ω-ACTX-Hv1a+2, or a variant thereof.

28. The mixture of claim 27, wherein the ACTX has an amino acid sequence according the amino acid sequence set forth in SEQ ID NOs: 5-6, 24, 534-635, 650-673, 724-728, 763-773, 866-867, 874-876, 878-886, 913-925, 958-992, 1038-42, 1104-1106, 1110-1118, 1141-1157, 1159-1210, 1553-1593, or 1776-1777.

29. The mixture of claim 28, wherein the ACTX has an amino acid sequence according the amino acid sequence set forth in SEQ ID NOs: 5, 6, 1776, or 1777.

30. The mixture of claim 29, wherein the ACTX has an amino acid sequence according the amino acid sequence set forth in SEQ ID NO: 5.

31. The mixture of claim 24, wherein the CRIP is a ctenitoxin (CNTX).

32. The mixture of claim 31, wherein the CNTX is Γ-CNTX-Pn1a.

33. The mixture of claim 32, wherein the Γ-CNTX-Pn1a has an amino acid sequence according the amino acid sequence set forth in SEQ ID NO: 1778.

34. The mixture of claim 24, wherein the Av2 toxin has an amino acid sequence according the amino acid sequence set forth in SEQ ID NO: 1779.

35. The mixture of claim 34, wherein the Av3 toxin has an amino acid sequence according the amino acid sequence set forth in SEQ ID NO: 1780.

36. The mixture of claim 24, wherein the Av3-Variant Polypeptide (AVP) has an amino acid sequence according the amino acid sequence set forth in SEQ ID NOs: 1781 or 1782.

37. The mixture of claim 1, wherein the CRIP is an U+2-ACTX-Hv1a having an amino acid sequence set forth in SEQ ID NO: 5; a Γ-CNTX-Pn1a having an amino acid sequence set forth in SEQ ID NO: 1778; or an Av3-Variant Polypeptide (AVP) having an amino acid sequence set forth in SEQ ID NO: 1782.

38. The mixture of claim 1, wherein the ratio of PFIP to CRIP is about 10,000:1, 5,000:1, 1,000:1, 500:1, 250:1, 200:1, 100:1, 99:1, 95:5, 90:10, 85:15, 80:20, 75:25, 70:30, 65:35, 60:40, 55:45, 1:1, 45:55, 40:60, 35:65, 30:70, 25:75, 20:80, 15:85, 10:90, 5:95, 1:99, 1:100, 1:200, 1:250, 1:500, 1:1,000, 1:5,000, or 1:10,000.

39. The mixture of claim 38, wherein the ratio of Bti toxin to ACTX is from about 1:1 to about 1:5000.

40. The mixture of claim 39, wherein the ratio of Bti toxin to ACTX is about 1:4000.

41. The mixture of claim 38, wherein the ratio of Btk toxin to ACTX is from about 1:1 to about 1:10.

42. The mixture of claim 41, wherein the ratio of Btk toxin to ACTX is about 1:9.2

43. The mixture of claim 38, wherein the ratio of Btk toxin to Av3 is from about 1:1 to about 1:1.5.

44. The mixture of claim 38, wherein the ratio of Btk toxin to AVP is about 1:1.375.

45. The mixture of claim 38, wherein the ratio of Btt toxin to ACTX is from about 1:1 to about 1:10.

46. The mixture of claim 45, wherein the ratio of Btt toxin to ACTX is about 1:8.75.

47. A composition comprising the mixture of claim 1, and an excipient.

48. The mixture of claim 1, wherein the first type of insecticidal peptide is a Bacillus thuringiensis ssp. tenebrionis (Btt) toxin; and wherein the second type of insecticidal peptide is an ACTX peptide.

49. The mixture of claim 48, wherein the Btt toxin is a Bacillus thuringiensis ssp. tenebrionis strain NB-176 Btt toxin; and wherein the ACTX peptide is a U+2-ACTX-Hv1a toxin (SEQ ID NO: 5).

50. The mixture of claim 1, wherein the first type of insecticidal peptide is a Bacillus thuringiensis ssp. kurstaki (Btk) toxin; and wherein the second type of insecticidal peptide is an ACTX peptide.

51. The mixture of claim 50, wherein the Btk toxin is a Bacillus thuringiensis ssp. kurstaki strain EVB-113-19 Btk toxin; and wherein the ACTX peptide is a U+2-ACTX-Hv1a toxin (SEQ ID NO: 5).

52. The mixture of claim 1, wherein the first type of insecticidal peptide is a Bacillus thuringiensis ssp. kurstaki (Btk toxin); and wherein the second type of insecticidal peptide is a CNTX.

53. The mixture of claim 52, wherein the Btk toxin is a Bacillus thuringiensis ssp. kurstaki strain EVB-113-19 Btk toxin; and wherein the CNTX is a Γ-CNTX-Pn1a toxin (SEQ ID NO: 1778).

54. The mixture of claim 1, wherein the first type of insecticidal peptide is a Bacillus thuringiensis ssp. kurstaki (Btk) toxin; and wherein the second type of insecticidal peptide is a Av3-Variant Polypeptide (AVP).

55. The mixture of claim 1, wherein the Btk toxin is a Bacillus thuringiensis ssp. kurstaki strain EVB-113-19 Btk toxin; and wherein the AVP is an Av3-Variant Polypeptide (AVP) having an amino acid sequence as set forth in SEQ ID NO: 1782.

56. The mixture of claim 1, wherein the first type of insecticidal peptide is a Bacillus thuringiensis ssp. israelensis (Bti) toxin; and wherein the second type of insecticidal peptide is an ACTX peptide.

57. The mixture of claim 56, wherein the Bti toxin is a Bacillus thuringiensis ssp. israelensis Strain BMP 144 Bti toxin; and wherein the ACTX peptide is a U+2-ACTX-Hv1a toxin (SEQ ID NO: 5).

58. A method of using the mixture of claim 1 to control insects comprising, providing a mixture of at least two types of peptides, wherein the first type of peptide is a PFIP, and the second type of peptide is a CRIP, wherein the PFIP is selected from one or any combination of the PFIPs of claims 2-23; and wherein the CRIP is selected from the one or any combination of the CRIPs of claims 24-36; wherein the PFIP is not fused to the CRIP; and then applying said mixture to the locus of an insect.

59. The method of claim 58, wherein the insects are selected from the group consisting of: Achema Sphinx Moth (Hornworm) (Eumorpha achemon); Alfalfa Caterpillar (Colias eurytheme); Almond Moth (Caudra cautella); Amorbia Moth (Amorbia humerosana); Armyworm (Spodoptera spp., e.g. exigua, frugiperda, littoralis, Pseudaletia unipuncta); Artichoke Plume Moth (Platyptilia carduidactyla); Azalea Caterpillar (Datana major); Bagworm (Thyridopteryx); ephemeraeformis); Banana Moth (Hypercompe scribonia); Banana Skipper (Erionota thrax); Blackheaded Budworm (Acleris gloverana); California Oakworm (Phryganidia californica); Spring Cankerworm (Paleacrita merriccata); Cherry Fruitworm (Grapholita packardi); China Mark Moth (Nymphula stagnata); Citrus Cutworm (Xylomyges curialis); Codling Moth (Cydia pomonella); Cranberry Fruitworm (Acrobasis vaccinii); Cross-striped Cabbageworm (Evergestis rimosalis); Cutworm (Noctuid species, Agrotis ipsilon); Douglas Fir Tussock Moth (Orgyia pseudotsugata); Ello Moth (Hornworm) (Erinnyis ello); Elm Spanworm (Ennomos subsignaria); European Grapevine Moth (Lobesia botrana); European Skipper (Thymelicus lineola (Essex Skipper); Fall Webworm (Melissopus latiferreanus; Filbert Leafroller (Archips rosanus; Fruittree Leafroller (Archips argyrospilia; Grape Berry Moth (Paralobesia viteana; Grape Leafroller (Platynota stultana; Grapeleaf Skeletonizer (Harrisina americana (ground only); Green Cloverworm (Plathypena scabra; Greenstriped Mapleworm (Dryocampa rubicunda; Gummosos-Batrachedra; Comosae (Hodges); Gypsy Moth (Lymantria dispar); Hemlock Looper (Lambdina fiscellaria); Hornworm (Manduca spp.); Imported Cabbageworm (Pieris rapae); io Moth (Automeris io); Jack Pine Budworm (Choristoneura pinus); Light Brown Apple Moth (Epiphyas postvittana); Melonworm (Diaphania hyalinata); Mimosa Webworm (Homadaula anisocentra); Obliquebanded Leafroller (Choristoneura rosaceana); Oleander Moth (Syntomeida epilais); Omnivorous Leafroller (Playnota stultana); Omnivorous Looper (Sabulodes aegrotata); Orangedog (Papilio cresphontes); Orange Tortrix (Argyrotaenia citrana); Oriental Fruit Moth (Grapholita molesta); Peach Twig Borer (Anarsia lineatella); Pine Butterfly (Neophasia menapia); Podworm (Heliocoverpa zea); Redbanded Leafroller (Argyrotaenia velutinana); Redhumped Caterpillar (Schizura concinna); Rindworm Complex (Various Leps.); Saddleback Caterpillar (Sibine stimulea); Saddle Prominent Caterpillar Heterocampa guttivitta); Saltmarsh Caterpillar (Estigmene acrea); Sod Webworm (Crambus spp.); Spanworm (Ennomos subsignaria); Fall Cankerworm (Alsophila pometaria); Spruce Budworm (Choristoneura fumiferana); Tent Caterpillar (Various Lasiocampidae); Thecla-Thecla basilides (Geyr) Thecla basilides); Tobacco Hornworm (Manduca sexta); Tobacco Moth (Ephestia elutella); Tufted Apple Budmoth (Platynota idaeusalis); Twig Borer (Anarsia lineatella); Variegated Cutworm (Peridroma saucia); Variegated Leafroller (Platynota flavedana); Velvetbean Caterpillar (Anticarsia gemmatalis); Walnut Caterpillar (Datana integerrima); Webworm (Hyphantria cunea); Western Tussock Moth (Orgyia vetusta); Southern Cornstalk Borer (Diatraea crambidoides); Corn Earworm; Sweet potato weevil; Pepper weevil; Citrus root weevil; Strawberry root weevil; Pecan weevil; Filbert weevil; Ricewater weevil; Alfalfa weevil; Clover weevil; Tea shot-hole borer; Root weevil; Sugarcane beetle; Coffee berry borer; Annual blue grass weevil (Listronotus maculicollis); Asiatic garden beetle (Maladera castanea); European chafer (Rhizotroqus majalis); Green June beetle (Cotinis nitida); Japanese beetle (Popillia japonica); May or June beetle (Phyllophaga sp.); Northern masked chafer (Cyclocephala borealis); Oriental beetle (Anomala orientalis); Southern masked chafer (Cyclocephala lurida); Billbug (Curculionoidea); Aedes aegypti; Busseola fusca; Chilo suppressalis; Culex pipiens; Culex quinquefasciatus; Diabrotica virgifera; Diatraea saccharalis; Helicoverpa armigera; Helicoverpa zea; Heliothis virescens; Leptinotarsa decemlineata; Ostrinia furnacalis; Ostrinia nubilalis; Pectinophora gossypiella; Plodia interpunctella; Plutella xylostella; Pseudoplusia includens; Spodoptera exigua; Spodoptera frugiperda; Spodoptera littoralis; Trichoplusia ni; and Xanthogaleruca luteola.

60. A method of using the mixture of claim 1 to control Bacillus thuringiensis-toxin-resistant insects comprising, providing a mixture of at least two types of peptides, wherein the first type of peptide is a PFIP, and the second type of peptide is a CRIP, wherein the PFIP is selected from one or any combination of the PFIPs of claims 2-23; and wherein the CRIP is selected from the one or any combination of the CRIPs of claims 24-36; wherein the PFIP is not fused to the CRIP; and then applying said mixture to the locus of an insect.

61. The method of claim 60, wherein the Bacillus thuringiensis-toxin-resistant insects are selected from the group consisting of: Aedes aegypti; Busseola fusca; Chilo suppressalis; Culex pipiens; Culex quinquefasciatus; Diabrotica virgifera; Diatraea saccharalis; Helicoverpa armigera; Helicoverpa zea; Heliothis virescens; Leptinotarsa decemlineata; Ostrinia furnacalis; Ostrinia nubilalis; Pectinophora gossypiella; Plodia interpunctella; Plutella xylostella; Pseudoplusia includens; Spodoptera exigua; Spodoptera frugiperda; Spodoptera littoralis; Trichoplusia ni; and Xanthogaleruca luteola.

62. A method of protecting a plant from an insect comprising, providing a plant which expresses two or more polypeptides, wherein one type of polypeptide is a PFIP, or a polynucleotide encoding the same; and the other type of polypeptide is a CRIP, or polynucleotide encoding the same; and wherein the PFIP is not fused to the CRIP.

63. The method of claim 62, wherein the insect is selected from the group consisting of: Achema Sphinx Moth (Hornworm) (Eumorpha achemon); Alfalfa Caterpillar (Colias eurytheme); Almond Moth (Caudra cautella); Amorbia Moth (Amorbia humerosana); Armyworm (Spodoptera spp., e.g. exigua, frugiperda, littoralis, Pseudaletia unipuncta); Artichoke Plume Moth (Platyptilia carduidactyla); Azalea Caterpillar (Datana major); Bagworm (Thyridopteryx); ephemeraeformis); Banana Moth (Hypercompe scribonia); Banana Skipper (Erionota thrax); Blackheaded Budworm (Acleris gloverana); California Oakworm (Phryganidia californica); Spring Cankerworm (Paleacrita merriccata); Cherry Fruitworm (Grapholita packardi); China Mark Moth (Nymphula stagnata); Citrus Cutworm (Xylomyges curialis); Codling Moth (Cydia pomonella); Cranberry Fruitworm (Acrobasis vaccinii); Cross-striped Cabbageworm (Evergestis rimosalis); Cutworm (Noctuid species, Agrotis ipsilon); Douglas Fir Tussock Moth (Orgyia pseudotsugata); Ello Moth (Hornworm) (Erinnyis ello); Elm Spanworm (Ennomos subsignaria); European Grapevine Moth (Lobesia botrana); European Skipper (Thymelicus lineola (Essex Skipper); Fall Webworm (Melissopus latiferreanus; Filbert Leafroller (Archips rosanus; Fruittree Leafroller (Archips argyrospilia; Grape Berry Moth (Paralobesia viteana; Grape Leafroller (Platynota stultana; Grapeleaf Skeletonizer (Harrisina americana (ground only); Green Cloverworm (Plathypena scabra; Greenstriped Mapleworm (Dryocampa rubicunda; Gummosos-Batrachedra; Comosae (Hodges); Gypsy Moth (Lymantria dispar); Hemlock Looper (Lambdina fiscellaria); Hornworm (Manduca spp.); Imported Cabbageworm (Pieris rapae); io Moth (Automeris io); Jack Pine Budworm (Choristoneura pinus); Light Brown Apple Moth (Epiphyas postvittana); Melonworm (Diaphania hyalinata); Mimosa Webworm (Homadaula anisocentra); Obliquebanded Leafroller (Choristoneura rosaceana); Oleander Moth (Syntomeida epilais); Omnivorous Leafroller (Playnota stultana); Omnivorous Looper (Sabulodes aegrotata); Orangedog (Papilio cresphontes); Orange Tortrix (Argyrotaenia citrana); Oriental Fruit Moth (Grapholita molesta); Peach Twig Borer (Anarsia lineatella); Pine Butterfly (Neophasia menapia); Podworm (Heliocoverpa zea); Redbanded Leafroller (Argyrotaenia velutinana); Redhumped Caterpillar (Schizura concinna); Rindworm Complex (Various Leps.); Saddleback Caterpillar (Sibine stimulea); Saddle Prominent Caterpillar Heterocampa guttivitta); Saltmarsh Caterpillar (Estigmene acrea); Sod Webworm (Crambus spp.); Spanworm (Ennomos subsignaria); Fall Cankerworm (Alsophila pometaria); Spruce Budworm (Choristoneura fumiferana); Tent Caterpillar (Various Lasiocampidae); Thecla-Thecla basilides (Geyr) Thecla basilides); Tobacco Hornworm (Manduca sexta); Tobacco Moth (Ephestia elutella); Tufted Apple Budmoth (Platynota idaeusalis); Twig Borer (Anarsia lineatella); Variegated Cutworm (Peridroma saucia); Variegated Leafroller (Platynota flavedana); Velvetbean Caterpillar (Anticarsia gemmatalis); Walnut Caterpillar (Datana integerrima); Webworm (Hyphantria cunea); Western Tussock Moth (Orgyia vetusta); Southern Cornstalk Borer (Diatraea crambidoides); Corn Earworm; Sweet potato weevil; Pepper weevil; Citrus root weevil; Strawberry root weevil; Pecan weevil; Filbert weevil; Ricewater weevil; Alfalfa weevil; Clover weevil; Tea shot-hole borer; Root weevil; Sugarcane beetle; Coffee berry borer; Annual blue grass weevil (Listronotus maculicollis); Asiatic garden beetle (Maladera castanea); European chafer (Rhizotroqus majalis); Green June beetle (Cotinis nitida); Japanese beetle (Popillia japonica); May or June beetle (Phyllophaga sp.); Northern masked chafer (Cyclocephala borealis); Oriental beetle (Anomala orientalis); Southern masked chafer (Cyclocephala lurida); Billbug (Curculionoidea); Aedes aegypti; Busseola fusca; Chilo suppressalis; Culex pipiens; Culex quinquefasciatus; Diabrotica virgifera; Diatraea saccharalis; Helicoverpa armigera; Helicoverpa zea; Heliothis virescens; Leptinotarsa decemlineata; Ostrinia furnacalis; Ostrinia nubilalis; Pectinophora gossypiella; Plodia interpunctella; Plutella xylostella; Pseudoplusia includens; Spodoptera exigua; Spodoptera frugiperda; Spodoptera littoralis; Trichoplusia ni; and Xanthogaleruca luteola.

64. A method of protecting a plant from a Bacillus thuringiensis-toxin-resistant insect comprising, providing a plant which expresses two or more polypeptides, wherein one type of polypeptide is a PFIP, or a polynucleotide encoding the same; and the other type of polypeptide is a CRIP, or polynucleotide encoding the same; and wherein the PFIP is not fused to the CRIP.

65. The method of claim 64, wherein the Bacillus thuringiensis-toxin-resistant insects are selected from the group consisting of: Aedes aegypti; Busseola fusca; Chilo suppressalis; Culex pipiens; Culex quinquefasciatus; Diabrotica virgifera; Diatraea saccharalis; Helicoverpa armigera; Helicoverpa zea; Heliothis virescens; Leptinotarsa decemlineata; Ostrinia furnacalis; Ostrinia nubilalis; Pectinophora gossypiella; Plodia interpunctella; Plutella xylostella; Pseudoplusia includens; Spodoptera exigua; Spodoptera frugiperda; Spodoptera littoralis; Trichoplusia ni; and Xanthogaleruca luteola.

66. A method for controlling insects comprising, providing to said insect a transgenic plant that comprises in its genome a stably incorporated nucleic acid construct, wherein said stably incorporated nucleic acid construct comprises a first polynucleotide operable to encode a PFIP, and a second polynucleotide operable to encode a CRIP.

67. A method of combating, controlling, or inhibiting a pest comprising, applying a pesticidally effective amount of the mixture of claim 1 to the locus of the pest, or to a plant or animal susceptible to an attack by the pest.

68. The method of claim 67, wherein the pest is selected from the group consisting of: Achema Sphinx Moth (Hornworm) (Eumorpha achemon); Alfalfa Caterpillar (Colias eurytheme); Almond Moth (Caudra cautella); Amorbia Moth (Amorbia humerosana); Armyworm (Spodoptera spp., e.g. exigua, frugiperda, littoralis, Pseudaletia unipuncta); Artichoke Plume Moth (Platyptilia carduidactyla); Azalea Caterpillar (Datana major); Bagworm (Thyridopteryx); ephemeraeformis); Banana Moth (Hypercompe scribonia); Banana Skipper (Erionota thrax); Blackheaded Budworm (Acleris gloverana); California Oakworm (Phryganidia californica); Spring Cankerworm (Paleacrita merriccata); Cherry Fruitworm (Grapholita packardi); China Mark Moth (Nymphula stagnata); Citrus Cutworm (Xylomyges curialis); Codling Moth (Cydia pomonella); Cranberry Fruitworm (Acrobasis vaccinii); Cross-striped Cabbageworm (Evergestis rimosalis); Cutworm (Noctuid species, Agrotis ipsilon); Douglas Fir Tussock Moth (Orgyia pseudotsugata); Ello Moth (Hornworm) (Erinnyis ello); Elm Spanworm (Ennomos subsignaria); European Grapevine Moth (Lobesia botrana); European Skipper (Thymelicus lineola (Essex Skipper); Fall Webworm (Melissopus latiferreanus; Filbert Leafroller (Archips rosanus; Fruittree Leafroller (Archips argyrospilia; Grape Berry Moth (Paralobesia viteana; Grape Leafroller (Platynota stultana; Grapeleaf Skeletonizer (Harrisina americana (ground only); Green Cloverworm (Plathypena scabra; Greenstriped Mapleworm (Dryocampa rubicunda; Gummosos-Batrachedra; Comosae (Hodges); Gypsy Moth (Lymantria dispar); Hemlock Looper (Lambdina fiscellaria); Hornworm (Manduca spp.); Imported Cabbageworm (Pieris rapae); io Moth (Automeris io); Jack Pine Budworm (Choristoneura pinus); Light Brown Apple Moth (Epiphyas postvittana); Melonworm (Diaphania hyalinata); Mimosa Webworm (Homadaula anisocentra); Obliquebanded Leafroller (Choristoneura rosaceana); Oleander Moth (Syntomeida epilais); Omnivorous Leafroller (Playnota stultana); Omnivorous Looper (Sabulodes aegrotata); Orangedog (Papilio cresphontes); Orange Tortrix (Argyrotaenia citrana); Oriental Fruit Moth (Grapholita molesta); Peach Twig Borer (Anarsia lineatella); Pine Butterfly (Neophasia menapia); Podworm (Heliocoverpa zea); Redbanded Leafroller (Argyrotaenia velutinana); Redhumped Caterpillar (Schizura concinna); Rindworm Complex (Various Leps.); Saddleback Caterpillar (Sibine stimulea); Saddle Prominent Caterpillar Heterocampa guttivitta); Saltmarsh Caterpillar (Estigmene acrea); Sod Webworm (Crambus spp.); Spanworm (Ennomos subsignaria); Fall Cankerworm (Alsophila pometaria); Spruce Budworm (Choristoneura fumiferana); Tent Caterpillar (Various Lasiocampidae); Thecla-Thecla basilides (Geyr) Thecla basilides); Tobacco Hornworm (Manduca sexta); Tobacco Moth (Ephestia elutella); Tufted Apple Budmoth (Platynota idaeusalis); Twig Borer (Anarsia lineatella); Variegated Cutworm (Peridroma saucia); Variegated Leafroller (Platynota flavedana); Velvetbean Caterpillar (Anticarsia gemmatalis); Walnut Caterpillar (Datana integerrima); Webworm (Hyphantria cunea); Western Tussock Moth (Orgyia vetusta); Southern Cornstalk Borer (Diatraea crambidoides); Corn Earworm; Sweet potato weevil; Pepper weevil; Citrus root weevil; Strawberry root weevil; Pecan weevil; Filbert weevil; Ricewater weevil; Alfalfa weevil; Clover weevil; Tea shot-hole borer; Root weevil; Sugarcane beetle; Coffee berry borer; Annual blue grass weevil (Listronotus maculicollis); Asiatic garden beetle (Maladera castanea); European chafer (Rhizotroqus majalis); Green June beetle (Cotinis nitida); Japanese beetle (Popillia japonica); May or June beetle (Phyllophaga sp.); Northern masked chafer (Cyclocephala borealis); Oriental beetle (Anomala orientalis); Southern masked chafer (Cyclocephala lurida); Billbug (Curculionoidea); Aedes aegypti; Busseola fusca; Chilo suppressalis; Culex pipiens; Culex quinquefasciatus; Diabrotica virgifera; Diatraea saccharalis; Helicoverpa armigera; Helicoverpa zea; Heliothis virescens; Leptinotarsa decemlineata; Ostrinia furnacalis; Ostrinia nubilalis; Pectinophora gossypiella; Plodia interpunctella; Plutella xylostella; Pseudoplusia includens; Spodoptera exigua; Spodoptera frugiperda; Spodoptera littoralis; Trichoplusia ni; and Xanthogaleruca luteola.

69. The method of claim 68, wherein the pest is selected from the group consisting of: Aedes aegypti; Busseola fusca; Chilo suppressalis; Culex pipiens; Culex quinquefasciatus; Diabrotica virgifera; Diatraea saccharalis; Helicoverpa armigera; Helicoverpa zea; Heliothis virescens, Leptinotarsa decemlineata; Ostrinia furnacalis; Ostrinia nubilalis; Pectinophora gossypiella; Plodia interpunctella; Plutella xylostella; Pseudoplusia includens; Spodoptera exigua; Spodoptera frugiperda; Spodoptera littoralis; Trichoplusia ni; and Xanthogaleruca luteola.
